United States Patent Application Publication US 2026/0373201 A1, published November 26, 2026 (application 19/711,586).

The application's sequence listing, which the Patent Office published only in electronic form, follows.

SEQUENCE LISTING (1399 sequences)

SEQ ID NO: 1 - protein, 167 aa, Escherichia coli
  REGION 1..167: note = misc_feature - TadA*7.10 (ecTadA) polypeptide sequence
MSEVEFSHEYWMRHALTLAKRARDEREVPVGAVLVLNNRVIGEGWNRAIGLHDPTAHAEIMALRQGGLVMQNYRLIDATLYVTFEPCVMCAGAMIHSRIGRVVFGVRNAKTGAAGSLMDVLHYPGMNHRVEITEGILADECAALLCYFFRMPRQVFNAQKKAQSSTD

SEQ ID NO: 2 - DNA, 4092 bp, synthetic construct
  misc_feature 1..4092: note = BhCas12b GGSGGS-ABE8-Xten20at P153 polynucleotide sequence
  misc_feature 1..6: note = Kozak sequence
  misc_feature 7..57: note = Sequence encoding N-terminal nuclear localization signal
  misc_feature 58..513: note = Sequence encoding BhCas12b
  misc_feature 514..531: note = Sequence encoding a linker
  misc_feature 532..1029: note = Sequence encoding TadA*8
  misc_feature 1030..1089: note = Sequence encoding Xten20 linker
  misc_feature 1090..3954: note = Sequence encoding BhCas12b
  misc_feature 3955..4002: note = Sequence encoding C-terminal NLS
  misc_feature 4003..4008: note = Sequence encoding GS linker
  misc_feature 4009..4089: note = Sequence encoding 3x hemagglutinin (HA) tag
  source 1..4092: mol_type = other DNA
gccaccatggccccaaagaagaagcggaaggtcggtatccacggagtcccagcagccgccaccagatccttcatcctgaagatcgagcccaacgaggaagtgaagaaaggcctctggaaaacccacgaggtgctgaaccacggaatcgcctactacatgaatatcctgaagctgatccggcaagaggccatctacgagcaccacgagcaggaccccaagaatcccaagaaggtgtccaaggccgagatccaggccgagctgtgggatttcgtgctgaagatgcagaagtgcaacagcttcacacacgaggtggacaaggacgaggtgttcaacatcctgagagagctgtacgaggaactggtgcccagcagcgtggaaaagaagggcgaagccaaccagctgagcaacaagtttctgtaccctctggtggaccccaacagccagtctggaaagggaacagccagcagcggcagaaagcccagatggtacaacctgaagattgccggcgatcccggaggctctggaggaagctccgaagtcgagttttcccatgagtactggatgagacacgcattgactctcgcaaagagggctcgagatgaacgcgaggtgcccgtgggggcagtactcgtgctcaacaatcgcgtaatcggcgaaggttggaatagggcaatcggactccacgaccccactgcacatgcggaaatcatggcccttcgacagggagggcttgtgatgcagaattatcgactttatgatgcgacgctgtacgtcacgtttgaaccttgcgtaatgtgcgcgggagctatgattcactcccgcattggacgagttgtattcggtgttcgcaacgccaagacgggtgccgcaggttcactgatggacgtgctgcatcatccaggcatgaaccaccgggtagaaatcacagaaggcatattggcggacgaatgtgcggcgctgttgtgtcgtttttttcgcatgcccaggcgggtctttaacgcccagaaaaaagcacaatcctctactgacggctcttctggatctgaaacacctggcacaagcgagagcgccacccctgagagctctggctcctgggaagaagagaagaagaagtgggaagaagataagaaaaaggacccgctggccaagatcctgggcaagctggctgagtacggactgatccctctgttcatcccctacaccgacagcaacgagcccatcgtgaaagaaatcaagtggatggaaaagtcccggaaccagagcgtgcggcggctggataaggacatgttcattcaggccctggaacggttcctgagctgggagagctggaacctgaaagtgaaagaggaatacgagaaggtcgagaaagagtacaagaccctggaagagaggatcaaagaggacatccaggctctgaaggctctggaacagtatgagaaagagcggcaagaacagctgctgcgggacaccctgaacaccaacgagtaccggctgagcaagagaggccttagaggctggcgggaaatcatccagaaatggctgaaaatggacgagaacgagccctccgagaagtacctggaagtgttcaaggactaccagcggaagcaccctagagaggccggcgattacagcgtgtacgagttcctgtccaagaaagagaaccacttcatctggcggaatcaccctgagtacccctacctgtacgccaccttctgcgagatcgacaagaaaaagaaggacgccaagcagcaggccaccttcacactggccgatcctatcaatcaccctctgtgggtccgattcgaggaaagaagcggcagcaacctgaacaagtacagaatcctgaccgagcagctgcacaccgagaagctgaagaaaaagctgacagtgcagctggaccggctgatctaccctacagaatctggcggctgggaagagaagggcaaagtggacattgtgctgctgcccagccggcagttctacaaccagatcttcctggacatcgaggaaaagggcaagcacgccttcacctacaaggatgagagcatcaagttccctctgaagggcacactcggcggagccagagtgcagttcgacagagatcacctgagaagataccctcacaaggtggaaagcggcaacgtgggcagaatctacttcaacatgaccgtgaacatcgagcctacagagtccccagtgtccaagtctctgaagatccaccgggacgacttccccaaggtggtcaacttcaagcccaaagaactgaccgagtggatcaaggacagcaagggcaagaaactgaagtccggcatcgagtccctggaaatcggcctgagagtgatgagcatcgacctgggacagagacaggccgctgccgcctctattttcgaggtggtggatcagaagcccgacatcgaaggcaagctgtttttcccaatcaagggcaccgagctgtatgccgtgcacagagccagcttcaacatcaagctgcccggcgagacactggtcaagagcagagaagtgctgcggaaggccagagaggacaatctgaaactgatgaaccagaagctcaacttcctgcggaacgtgctgcacttccagcagttcgaggacatcaccgagagagagaagcgggtcaccaagtggatcagcagacaagagaacagcgacgtgcccctggtgtaccaggatgagctgatccagatccgcgagctgatgtacaagccttacaaggactgggtcgccttcctgaagcagctccacaagagactggaagtcgagatcggcaaagaagtgaagcactggcggaagtccctgagcgacggaagaaagggcctgtacggcatctccctgaagaacatcgacgagatcgatcggacccggaagttcctgctgagatggtccctgaggcctaccgaacctggcgaagtgcgtagactggaacccggccagagattcgccatcgaccagctgaatcacctgaacgccctgaaagaagatcggctgaagaagatggccaacaccatcatcatgcacgccctgggctactgctacgacgtgcggaagaagaaatggcaggctaagaaccccgcctgccagatcatcctgttcgaggatctgagcaactacaacccctacgaggaaaggtcccgcttcgagaacagcaagctcatgaagtggtccagacgcgagatccccagacaggttgcactgcagggcgagatctatggcctgcaagtgggagaagtgggcgctcagttcagcagcagattccacgccaagacaggcagccctggcatcagatgtagcgtcgtgaccaaagagaagctgcaggacaatcggttcttcaagaatctgcagagagagggcagactgaccctggacaaaatcgccgtgctgaaagagggcgatctgtacccagacaaaggcggcgagaagttcatcagcctgagcaaggatcggaagtgcgtgaccacacacgccgacatcaacgccgctcagaacctgcagaagcggttctggacaagaacccacggcttctacaaggtgtactgcaaggcctaccaggtggacggccagaccgtgtacatccctgagagcaaggaccagaagcagaagatcatcgaagagttcggcgagggctacttcattctgaaggacggggtgtacgaatgggtcaacgccggcaagctgaaaatcaagaagggcagctccaagcagagcagcagcgagctggtggatagcgacatcctgaaagacagcttcgacctggcctccgagctgaaaggcgaaaagctgatgctgtacagggaccccagcggcaatgtgttccccagcgacaaatggatggccgctggcgtgttcttcggaaagctggaacgcatcctgatcagcaagctgaccaaccagtactccatcagcaccatcgaggacgacagcagcaagcagtctatgaaaaggccggcggccacgaaaaaggccggccaggcaaaaaagaaaaagggatcctacccatacgatgttccagattacgcttatccctacgacgtgcctgattatgcatacccatatgatgtccccgactatgcctaa

SEQ ID NO: 3 - protein, 1361 aa, synthetic construct
  REGION 1..1361: note = BhCas12b GGSGGS-ABE8-Xten20at P153 polypeptide sequence
MAPKKKRKVGIHGVPAAATRSFILKIEPNEEVKKGLWKTHEVLNHGIAYYMNILKLIRQEAIYEHHEQDPKNPKKVSKAEIQAELWDFVLKMQKCNSFTHEVDKDEVFNILRELYEELVPSSVEKKGEANQLSNKFLYPLVDPNSQSGKGTASSGRKPRWYNLKIAGDPGGSGGSSEVEFSHEYWMRHALTLAKRARDEREVPVGAVLVLNNRVIGEGWNRAIGLHDPTAHAEIMALRQGGLVMQNYRLYDATLYVTFEPCVMCAGAMIHSRIGRVVFGVRNAKTGAAGSLMDVLHHPGMNHRVEITEGILADECAALLCRFFRMPRRVFNAQKKAQSSTDGSSGSETPGTSESATPESSGSWEEEKKKWEEDKKKDPLAKILGKLAEYGLIPLFIPYTDSNEPIVKEIKWMEKSRNQSVRRLDKDMFIQALERFLSWESWNLKVKEEYEKVEKEYKTLEERIKEDIQALKALEQYEKERQEQLLRDTLNTNEYRLSKRGLRGWREIIQKWLKMDENEPSEKYLEVFKDYQRKHPREAGDYSVYEFLSKKENHFIWRNHPEYPYLYATFCEIDKKKKDAKQQATFTLADPINHPLWVRFEERSGSNLNKYRILTEQLHTEKLKKKLTVQLDRLIYPTESGGWEEKGKVDIVLLPSRQFYNQIFLDIEEKGKHAFTYKDESIKFPLKGTLGGARVQFDRDHLRRYPHKVESGNVGRIYFNMTVNIEPTESPVSKSLKIHRDDFPKVVNFKPKELTEWIKDSKGKKLKSGIESLEIGLRVMSIDLGQRQAAAASIFEVVDQKPDIEGKLFFPIKGTELYAVHRASFNIKLPGETLVKSREVLRKAREDNLKLMNQKLNFLRNVLHFQQFEDITEREKRVTKWISRQENSDVPLVYQDELIQIRELMYKPYKDWVAFLKQLHKRLEVEIGKEVKHWRKSLSDGRKGLYGISLKNIDEIDRTRKFLLRWSLRPTEPGEVRRLEPGQRFAIDQLNHLNALKEDRLKKMANTIIMHALGYCYDVRKKKWQAKNPACQIILFEDLSNYNPYEERSRFENSKLMKWSRREIPRQVALQGEIYGLQVGEVGAQFSSRFHAKTGSPGIRCSVVTKEKLQDNRFFKNLQREGRLTLDKIAVLKEGDLYPDKGGEKFISLSKDRKCVTTHADINAAQNLQKRFWTRTHGFYKVYCKAYQVDGQTVYIPESKDQKQKIIEEFGEGYFILKDGVYEWVNAGKLKIKKGSSKQSSSELVDSDILKDSFDLASELKGEKLMLYRDPSGNVFPSDKWMAAGVFFGKLERILISKLTNQYSISTIEDDSSKQSMKRPAATKKAGQAKKKKGSYPYDVPDYAYPYDVPDYAYPYDVPDYA

SEQ ID NO: 4 - DNA, 4092 bp, synthetic construct
  misc_feature 1..4092: note = BhCas12b GGSGGS-ABE8-Xten20at K255 polynucleotide sequence
  misc_feature 1..6: note = Kozak sequence
  misc_feature 7..57: note = Sequence encoding N-terminal nuclear localization signal (NLS)
  misc_feature 58..822: note = Sequence encoding BhCas12b
  misc_feature 823..840: note = Sequence encoding a linker
  misc_feature 841..1338: note = Sequence encoding TadA*8
  misc_feature 1339..1398: note = Sequence encoding Xten20 linker
  misc_feature 1399..3954: note = Sequence encoding BhCas12b
  misc_feature 3955..4002: note = Sequence encoding C-terminal NLS
  misc_feature 4003..4008: note = Sequence encoding a GS linker
  misc_feature 4009..4089: note = Sequence encoding 3x hemagglutinin (HA) tag
  source 1..4092: mol_type = other DNA
gccaccatggccccaaagaagaagcggaaggtcggtatccacggagtcccagcagccgccaccagatccttcatcctgaagatcgagcccaacgaggaagtgaagaaaggcctctggaaaacccacgaggtgctgaaccacggaatcgcctactacatgaatatcctgaagctgatccggcaagaggccatctacgagcaccacgagcaggaccccaagaatcccaagaaggtgtccaaggccgagatccaggccgagctgtgggatttcgtgctgaagatgcagaagtgcaacagcttcacacacgaggtggacaaggacgaggtgttcaacatcctgagagagctgtacgaggaactggtgcccagcagcgtggaaaagaagggcgaagccaaccagctgagcaacaagtttctgtaccctctggtggaccccaacagccagtctggaaagggaacagccagcagcggcagaaagcccagatggtacaacctgaagattgccggcgatccctcctgggaagaagagaagaagaagtgggaagaagataagaaaaaggacccgctggccaagatcctgggcaagctggctgagtacggactgatccctctgttcatcccctacaccgacagcaacgagcccatcgtgaaagaaatcaagtggatggaaaagtcccggaaccagagcgtgcggcggctggataaggacatgttcattcaggccctggaacggttcctgagctgggagagctggaacctgaaagtgaaagaggaatacgagaaggtcgagaaagagtacaagaccctggaagagaggatcaaaggaggctctggaggaagctccgaagtcgagttttcccatgagtactggatgagacacgcattgactctcgcaaagagggctcgagatgaacgcgaggtgcccgtgggggcagtactcgtgctcaacaatcgcgtaatcggcgaaggttggaatagggcaatcggactccacgaccccactgcacatgcggaaatcatggcccttcgacagggagggcttgtgatgcagaattatcgactttatgatgcgacgctgtacgtcacgtttgaaccttgcgtaatgtgcgcgggagctatgattcactcccgcattggacgagttgtattcggtgttcgcaacgccaagacgggtgccgcaggttcactgatggacgtgctgcatcatccaggcatgaaccaccgggtagaaatcacagaaggcatattggcggacgaatgtgcggcgctgttgtgtcgtttttttcgcatgcccaggcgggtctttaacgcccagaaaaaagcacaatcctctactgacggctcttctggatctgaaacacctggcacaagcgagagcgccacccctgagagctctggcgaggacatccaggctctgaaggctctggaacagtatgagaaagagcggcaagaacagctgctgcgggacaccctgaacaccaacgagtaccggctgagcaagagaggccttagaggctggcgggaaatcatccagaaatggctgaaaatggacgagaacgagccctccgagaagtacctggaagtgttcaaggactaccagcggaagcaccctagagaggccggcgattacagcgtgtacgagttcctgtccaagaaagagaaccacttcatctggcggaatcaccctgagtacccctacctgtacgccaccttctgcgagatcgacaagaaaaagaaggacgccaagcagcaggccaccttcacactggccgatcctatcaatcaccctctgtgggtccgattcgaggaaagaagcggcagcaacctgaacaagtacagaatcctgaccgagcagctgcacaccgagaagctgaagaaaaagctgacagtgcagctggaccggctgatctaccctacagaatctggcggctgggaagagaagggcaaagtggacattgtgctgctgcccagccggcagttctacaaccagatcttcctggacatcgaggaaaagggcaagcacgccttcacctacaaggatgagagcatcaagttccctctgaagggcacactcggcggagccagagtgcagttcgacagagatcacctgagaagataccctcacaaggtggaaagcggcaacgtgggcagaatctacttcaacatgaccgtgaacatcgagcctacagagtccccagtgtccaagtctctgaagatccaccgggacgacttccccaaggtggtcaacttcaagcccaaagaactgaccgagtggatcaaggacagcaagggcaagaaactgaagtccggcatcgagtccctggaaatcggcctgagagtgatgagcatcgacctgggacagagacaggccgctgccgcctctattttcgaggtggtggatcagaagcccgacatcgaaggcaagctgtttttcccaatcaagggcaccgagctgtatgccgtgcacagagccagcttcaacatcaagctgcccggcgagacactggtcaagagcagagaagtgctgcggaaggccagagaggacaatctgaaactgatgaaccagaagctcaacttcctgcggaacgtgctgcacttccagcagttcgaggacatcaccgagagagagaagcgggtcaccaagtggatcagcagacaagagaacagcgacgtgcccctggtgtaccaggatgagctgatccagatccgcgagctgatgtacaagccttacaaggactgggtcgccttcctgaagcagctccacaagagactggaagtcgagatcggcaaagaagtgaagcactggcggaagtccctgagcgacggaagaaagggcctgtacggcatctccctgaagaacatcgacgagatcgatcggacccggaagttcctgctgagatggtccctgaggcctaccgaacctggcgaagtgcgtagactggaacccggccagagattcgccatcgaccagctgaatcacctgaacgccctgaaagaagatcggctgaagaagatggccaacaccatcatcatgcacgccctgggctactgctacgacgtgcggaagaagaaatggcaggctaagaaccccgcctgccagatcatcctgttcgaggatctgagcaactacaacccctacgaggaaaggtcccgcttcgagaacagcaagctcatgaagtggtccagacgcgagatccccagacaggttgcactgcagggcgagatctatggcctgcaagtgggagaagtgggcgctcagttcagcagcagattccacgccaagacaggcagccctggcatcagatgtagcgtcgtgaccaaagagaagctgcaggacaatcggttcttcaagaatctgcagagagagggcagactgaccctggacaaaatcgccgtgctgaaagagggcgatctgtacccagacaaaggcggcgagaagttcatcagcctgagcaaggatcggaagtgcgtgaccacacacgccgacatcaacgccgctcagaacctgcagaagcggttctggacaagaacccacggcttctacaaggtgtactgcaaggcctaccaggtggacggccagaccgtgtacatccctgagagcaaggaccagaagcagaagatcatcgaagagttcggcgagggctacttcattctgaaggacggggtgtacgaatgggtcaacgccggcaagctgaaaatcaagaagggcagctccaagcagagcagcagcgagctggtggatagcgacatcctgaaagacagcttcgacctggcctccgagctgaaaggcgaaaagctgatgctgtacagggaccccagcggcaatgtgttccccagcgacaaatggatggccgctggcgtgttcttcggaaagctggaacgcatcctgatcagcaagctgaccaaccagtactccatcagcaccatcgaggacgacagcagcaagcagtctatgaaaaggccggcggccacgaaaaaggccggccaggcaaaaaagaaaaagggatcctacccatacgatgttccagattacgcttatccctacgacgtgcctgattatgcatacccatatgatgtccccgactatgcctaa

SEQ ID NO: 5 - protein, 1361 aa, synthetic construct
  REGION 1..1361: note = BhCas12b GGSGGS-ABE8-Xten20at K255 polypeptide sequence
MAPKKKRKVGIHGVPAAATRSFILKIEPNEEVKKGLWKTHEVLNHGIAYYMNILKLIRQEAIYEHHEQDPKNPKKVSKAEIQAELWDFVLKMQKCNSFTHEVDKDEVFNILRELYEELVPSSVEKKGEANQLSNKFLYPLVDPNSQSGKGTASSGRKPRWYNLKIAGDPSWEEEKKKWEEDKKKDPLAKILGKLAEYGLIPLFIPYTDSNEPIVKEIKWMEKSRNQSVRRLDKDMFIQALERFLSWESWNLKVKEEYEKVEKEYKTLEERIKGGSGGSSEVEFSHEYWMRHALTLAKRARDEREVPVGAVLVLNNRVIGEGWNRAIGLHDPTAHAEIMALRQGGLVMQNYRLYDATLYVTFEPCVMCAGAMIHSRIGRVVFGVRNAKTGAAGSLMDVLHHPGMNHRVEITEGILADECAALLCRFFRMPRRVFNAQKKAQSSTDGSSGSETPGTSESATPESSGEDIQALKALEQYEKERQEQLLRDTLNTNEYRLSKRGLRGWREIIQKWLKMDENEPSEKYLEVFKDYQRKHPREAGDYSVYEFLSKKENHFIWRNHPEYPYLYATFCEIDKKKKDAKQQATFTLADPINHPLWVRFEERSGSNLNKYRILTEQLHTEKLKKKLTVQLDRLIYPTESGGWEEKGKVDIVLLPSRQFYNQIFLDIEEKGKHAFTYKDESIKFPLKGTLGGARVQFDRDHLRRYPHKVESGNVGRIYFNMTVNIEPTESPVSKSLKIHRDDFPKVVNFKPKELTEWIKDSKGKKLKSGIESLEIGLRVMSIDLGQRQAAAASIFEVVDQKPDIEGKLFFPIKGTELYAVHRASFNIKLPGETLVKSREVLRKAREDNLKLMNQKLNFLRNVLHFQQFEDITEREKRVTKWISRQENSDVPLVYQDELIQIRELMYKPYKDWVAFLKQLHKRLEVEIGKEVKHWRKSLSDGRKGLYGISLKNIDEIDRTRKFLLRWSLRPTEPGEVRRLEPGQRFAIDQLNHLNALKEDRLKKMANTIIMHALGYCYDVRKKKWQAKNPACQIILFEDLSNYNPYEERSRFENSKLMKWSRREIPRQVALQGEIYGLQVGEVGAQFSSRFHAKTGSPGIRCSVVTKEKLQDNRFFKNLQREGRLTLDKIAVLKEGDLYPDKGGEKFISLSKDRKCVTTHADINAAQNLQKRFWTRTHGFYKVYCKAYQVDGQTVYIPESKDQKQKIIEEFGEGYFILKDGVYEWVNAGKLKIKKGSSKQSSSELVDSDILKDSFDLASELKGEKLMLYRDPSGNVFPSDKWMAAGVFFGKLERILISKLTNQYSISTIEDDSSKQSMKRPAATKKAGQAKKKKGSYPYDVPDYAYPYDVPDYAYPYDVPDYA

SEQ ID NO: 6 - DNA, 4092 bp, synthetic construct
  misc_feature 1..4092: note = BhCas12b GGSGGS-ABE8-Xten20at D306 polynucleotide sequence
  misc_feature 1..6: note = Kozak sequence
  misc_feature 7..57: note = Sequence encoding N-terminal nuclear localization signal (NLS)
  misc_feature 58..975: note = Sequence encoding BhCas12b
  misc_feature 976..993: note = Sequence encoding a linker
  misc_feature 994..1491: note = Sequence encoding TadA*8
  misc_feature 1492..1551: note = Sequence encoding Xten20 linker
  misc_feature 1552..3954: note = Sequence encoding BhCas12b
  misc_feature 3955..4002: note = Sequence encoding C-terminal NLS
  misc_feature 4003..4008: note = Sequence encoding a GS linker
  misc_feature 4009..4089: note = Sequence encoding 3x hemagglutinin (HA) tag
  source 1..4092: mol_type = other DNA
gccaccatggccccaaagaagaagcggaaggtcggtatccacggagtcccagcagccgccaccagatccttcatcctgaagatcgagcccaacgaggaagtgaagaaaggcctctggaaaacccacgaggtgctgaaccacggaatcgcctactacatgaatatcctgaagctgatccggcaagaggccatctacgagcaccacgagcaggaccccaagaatcccaagaaggtgtccaaggccgagatccaggccgagctgtgggatttcgtgctgaagatgcagaagtgcaacagcttcacacacgaggtggacaaggacgaggtgttcaacatcctgagagagctgtacgaggaactggtgcccagcagcgtggaaaagaagggcgaagccaaccagctgagcaacaagtttctgtaccctctggtggaccccaacagccagtctggaaagggaacagccagcagcggcagaaagcccagatggtacaacctgaagattgccggcgatccctcctgggaagaagagaagaagaagtgggaagaagataagaaaaaggacccgctggccaagatcctgggcaagctggctgagtacggactgatccctctgttcatcccctacaccgacagcaacgagcccatcgtgaaagaaatcaagtggatggaaaagtcccggaaccagagcgtgcggcggctggataaggacatgttcattcaggccctggaacggttcctgagctgggagagctggaacctgaaagtgaaagaggaatacgagaaggtcgagaaagagtacaagaccctggaagagaggatcaaagaggacatccaggctctgaaggctctggaacagtatgagaaagagcggcaagaacagctgctgcgggacaccctgaacaccaacgagtaccggctgagcaagagaggccttagaggctggcgggaaatcatccagaaatggctgaaaatggacggaggctctggaggaagctccgaagtcgagttttcccatgagtactggatgagacacgcattgactctcgcaaagagggctcgagatgaacgcgaggtgcccgtgggggcagtactcgtgctcaacaatcgcgtaatcggcgaaggttggaatagggcaatcggactccacgaccccactgcacatgcggaaatcatggcccttcgacagggagggcttgtgatgcagaattatcgactttatgatgcgacgctgtacgtcacgtttgaaccttgcgtaatgtgcgcgggagctatgattcactcccgcattggacgagttgtattcggtgttcgcaacgccaagacgggtgccgcaggttcactgatggacgtgctgcatcatccaggcatgaaccaccgggtagaaatcacagaaggcatattggcggacgaatgtgcggcgctgttgtgtcgtttttttcgcatgcccaggcgggtctttaacgcccagaaaaaagcacaatcctctactgacggctcttctggatctgaaacacctggcacaagcgagagcgccacccctgagagctctggcgagaacgagccctccgagaagtacctggaagtgttcaaggactaccagcggaagcaccctagagaggccggcgattacagcgtgtacgagttcctgtccaagaaagagaaccacttcatctggcggaatcaccctgagtacccctacctgtacgccaccttctgcgagatcgacaagaaaaagaaggacgccaagcagcaggccaccttcacactggccgatcctatcaatcaccctctgtgggtccgattcgaggaaagaagcggcagcaacctgaacaagtacagaatcctgaccgagcagctgcacaccgagaagctgaagaaaaagctgacagtgcagctggaccggctgatctaccctacagaatctggcggctgggaagagaagggcaaagtggacattgtgctgctgcccagccggcagttctacaaccagatcttcctggacatcgaggaaaagggcaagcacgccttcacctacaaggatgagagcatcaagttccctctgaagggcacactcggcggagccagagtgcagttcgacagagatcacctgagaagataccctcacaaggtggaaagcggcaacgtgggcagaatctacttcaacatgaccgtgaacatcgagcctacagagtccccagtgtccaagtctctgaagatccaccgggacgacttccccaaggtggtcaacttcaagcccaaagaactgaccgagtggatcaaggacagcaagggcaagaaactgaagtccggcatcgagtccctggaaatcggcctgagagtgatgagcatcgacctgggacagagacaggccgctgccgcctctattttcgaggtggtggatcagaagcccgacatcgaaggcaagctgtttttcccaatcaagggcaccgagctgtatgccgtgcacagagccagcttcaacatcaagctgcccggcgagacactggtcaagagcagagaagtgctgcggaaggccagagaggacaatctgaaactgatgaaccagaagctcaacttcctgcggaacgtgctgcacttccagcagttcgaggacatcaccgagagagagaagcgggtcaccaagtggatcagcagacaagagaacagcgacgtgcccctggtgtaccaggatgagctgatccagatccgcgagctgatgtacaagccttacaaggactgggtcgccttcctgaagcagctccacaagagactggaagtcgagatcggcaaagaagtgaagcactggcggaagtccctgagcgacggaagaaagggcctgtacggcatctccctgaagaacatcgacgagatcgatcggacccggaagttcctgctgagatggtccctgaggcctaccgaacctggcgaagtgcgtagactggaacccggccagagattcgccatcgaccagctgaatcacctgaacgccctgaaagaagatcggctgaagaagatggccaacaccatcatcatgcacgccctgggctactgctacgacgtgcggaagaagaaatggcaggctaagaaccccgcctgccagatcatcctgttcgaggatctgagcaactacaacccctacgaggaaaggtcccgcttcgagaacagcaagctcatgaagtggtccagacgcgagatccccagacaggttgcactgcagggcgagatctatggcctgcaagtgggagaagtgggcgctcagttcagcagcagattccacgccaagacaggcagccctggcatcagatgtagcgtcgtgaccaaagagaagctgcaggacaatcggttcttcaagaatctgcagagagagggcagactgaccctggacaaaatcgccgtgctgaaagagggcgatctgtacccagacaaaggcggcgagaagttcatcagcctgagcaaggatcggaagtgcgtgaccacacacgccgacatcaacgccgctcagaacctgcagaagcggttctggacaagaacccacggcttctacaaggtgtactgcaaggcctaccaggtggacggccagaccgtgtacatccctgagagcaaggaccagaagcagaagatcatcgaagagttcggcgagggctacttcattctgaaggacggggtgtacgaatgggtcaacgccggcaagctgaaaatcaagaagggcagctccaagcagagcagcagcgagctggtggatagcgacatcctgaaagacagcttcgacctggcctccgagctgaaaggcgaaaagctgatgctgtacagggaccccagcggcaatgtgttccccagcgacaaatggatggccgctggcgtgttcttcggaaagctggaacgcatcctgatcagcaagctgaccaaccagtactccatcagcaccatcgaggacgacagcagcaagcagtctatgaaaaggccggcggccacgaaaaaggccggccaggcaaaaaagaaaaagggatcctacccatacgatgttccagattacgcttatccctacgacgtgcctgattatgcatacccatatgatgtccccgactatgcctaa

SEQ ID NO: 7 - protein, 1361 aa, synthetic construct
  REGION 1..1361: note = BhCas12b GGSGGS-ABE8-Xten20at D306 polypeptide sequence
MAPKKKRKVGIHGVPAAATRSFILKIEPNEEVKKGLWKTHEVLNHGIAYYMNILKLIRQEAIYEHHEQDPKNPKKVSKAEIQAELWDFVLKMQKCNSFTHEVDKDEVFNILRELYEELVPSSVEKKGEANQLSNKFLYPLVDPNSQSGKGTASSGRKPRWYNLKIAGDPSWEEEKKKWEEDKKKDPLAKILGKLAEYGLIPLFIPYTDSNEPIVKEIKWMEKSRNQSVRRLDKDMFIQALERFLSWESWNLKVKEEYEKVEKEYKTLEERIKEDIQALKALEQYEKERQEQLLRDTLNTNEYRLSKRGLRGWREIIQKWLKMDGGSGGSSEVEFSHEYWMRHALTLAKRARDEREVPVGAVLVLNNRVIGEGWNRAIGLHDPTAHAEIMALRQGGLVMQNYRLYDATLYVTFEPCVMCAGAMIHSRIGRVVFGVRNAKTGAAGSLMDVLHHPGMNHRVEITEGILADECAALLCRFFRMPRRVFNAQKKAQSSTDGSSGSETPGTSESATPESSGENEPSEKYLEVFKDYQRKHPREAGDYSVYEFLSKKENHFIWRNHPEYPYLYATFCEIDKKKKDAKQQATFTLADPINHPLWVRFEERSGSNLNKYRILTEQLHTEKLKKKLTVQLDRLIYPTESGGWEEKGKVDIVLLPSRQFYNQIFLDIEEKGKHAFTYKDESIKFPLKGTLGGARVQFDRDHLRRYPHKVESGNVGRIYFNMTVNIEPTESPVSKSLKIHRDDFPKVVNFKPKELTEWIKDSKGKKLKSGIESLEIGLRVMSIDLGQRQAAAASIFEVVDQKPDIEGKLFFPIKGTELYAVHRASFNIKLPGETLVKSREVLRKAREDNLKLMNQKLNFLRNVLHFQQFEDITEREKRVTKWISRQENSDVPLVYQDELIQIRELMYKPYKDWVAFLKQLHKRLEVEIGKEVKHWRKSLSDGRKGLYGISLKNIDEIDRTRKFLLRWSLRPTEPGEVRRLEPGQRFAIDQLNHLNALKEDRLKKMANTIIMHALGYCYDVRKKKWQAKNPACQIILFEDLSNYNPYEERSRFENSKLMKWSRREIPRQVALQGEIYGLQVGEVGAQFSSRFHAKTGSPGIRCSVVTKEKLQDNRFFKNLQREGRLTLDKIAVLKEGDLYPDKGGEKFISLSKDRKCVTTHADINAAQNLQKRFWTRTHGFYKVYCKAYQVDGQTVYIPESKDQKQKIIEEFGEGYFILKDGVYEWVNAGKLKIKKGSSKQSSSELVDSDILKDSFDLASELKGEKLMLYRDPSGNVFPSDKWMAAGVFFGKLERILISKLTNQYSISTIEDDSSKQSMKRPAATKKAGQAKKKKGSYPYDVPDYAYPYDVPDYAYPYDVPDYA

SEQ ID NO: 8 - DNA, 4092 bp, synthetic construct
  misc_feature 1..4092: note = BhCas12b GGSGGS-ABE8-Xten20at D980 polynucleotide sequence
  misc_feature 1..6: note = Kozak sequence
  misc_feature 7..57: note = Sequence encoding N-terminal nuclear localization signal (NLS)
  misc_feature 58..2997: note = Sequence encoding BhCas12b
  misc_feature 2998..3015: note = Sequence encoding a linker
  misc_feature 3016..3513: note = Sequence encoding TadA*8
  misc_feature 3514..3573: note = Sequence encoding Xten20 linker
  misc_feature 3574..3954: note = Sequence encoding BhCas12b
  misc_feature 3955..4002: note = Sequence encoding C-terminal NLS
  misc_feature 4003..4008: note = Sequence encoding a GS linker
  misc_feature 4009..4089: note = Sequence encoding 3x hemagglutinin (HA) tag
  source 1..4092: mol_type = other DNA
gccaccatggccccaaagaagaagcggaaggtcggtatccacggagtcccagcagccgccaccagatccttcatcctgaagatcgagcccaacgaggaagtgaagaaaggcctctggaaaacccacgaggtgctgaaccacggaatcgcctactacatgaatatcctgaagctgatccggcaagaggccatctacgagcaccacgagcaggaccccaagaatcccaagaaggtgtccaaggccgagatccaggccgagctgtgggatttcgtgctgaagatgcagaagtgcaacagcttcacacacgaggtggacaaggacgaggtgttcaacatcctgagagagctgtacgaggaactggtgcccagcagcgtggaaaagaagggcgaagccaaccagctgagcaacaagtttctgtaccctctggtggaccccaacagccagtctggaaagggaacagccagcagcggcagaaagcccagatggtacaacctgaagattgccggcgatccctcctgggaagaagagaagaagaagtgggaagaagataagaaaaaggacccgctggccaagatcctgggcaagctggctgagtacggactgatccctctgttcatcccctacaccgacagcaacgagcccatcgtgaaagaaatcaagtggatggaaaagtcccggaaccagagcgtgcggcggctggataaggacatgttcattcaggccctggaacggttcctgagctgggagagctggaacctgaaagtgaaagaggaatacgagaaggtcgagaaagagtacaagaccctggaagagaggatcaaagaggacatccaggctctgaaggctctggaacagtatgagaaagagcggcaagaacagctgctgcgggacaccctgaacaccaacgagtaccggctgagcaagagaggccttagaggctggcgggaaatcatccagaaatggctgaaaatggacgagaacgagccctccgagaagtacctggaagtgttcaaggactaccagcggaagcaccctagagaggccggcgattacagcgtgtacgagttcctgtccaagaaagagaaccacttcatctggcggaatcaccctgagtacccctacctgtacgccaccttctgcgagatcgacaagaaaaagaaggacgccaagcagcaggccaccttcacactggccgatcctatcaatcaccctctgtgggtccgattcgaggaaagaagcggcagcaacctgaacaagtacagaatcctgaccgagcagctgcacaccgagaagctgaagaaaaagctgacagtgcagctggaccggctgatctaccctacagaatctggcggctgggaagagaagggcaaagtggacattgtgctgctgcccagccggcagttctacaaccagatcttcctggacatcgaggaaaagggcaagcacgccttcacctacaaggatgagagcatcaagttccctctgaagggcacactcggcggagccagagtgcagttcgacagagatcacctgagaagataccctcacaaggtggaaagcggcaacgtgggcagaatctacttcaacatgaccgtgaacatcgagcctacagagtccccagtgtccaagtctctgaagatccaccgggacgacttccccaaggtggtcaacttcaagcccaaagaactgaccgagtggatcaaggacagcaagggcaagaaactgaagtccggcatcgagtccctggaaatcggcctgagagtgatgagcatcgacctgggacagagacaggccgctgccgcctctattttcgaggtggtggatcagaagcccgacatcgaaggcaagctgtttttcccaatcaagggcaccgagctgtatgccgtgcacagagccagcttcaacatcaagctgcccggcgagacactggtcaagagcagagaagtgctgcggaaggccagagaggacaatctgaaactgatgaaccagaagctcaacttcctgcggaacgtgctgcacttccagcagttcgaggacatcaccgagagagagaagcgggtcaccaagtggatcagcagacaagagaacagcgacgtgcccctggtgtaccaggatgagctgatccagatccgcgagctgatgtacaagccttacaaggactgggtcgccttcctgaagcagctccacaagagactggaagtcgagatcggcaaagaagtgaagcactggcggaagtccctgagcgacggaagaaagggcctgtacggcatctccctgaagaacatcgacgagatcgatcggacccggaagttcctgctgagatggtccctgaggcctaccgaacctggcgaagtgcgtagactggaacccggccagagattcgccatcgaccagctgaatcacctgaacgccctgaaagaagatcggctgaagaagatggccaacaccatcatcatgcacgccctgggctactgctacgacgtgcggaagaagaaatggcaggctaagaaccccgcctgccagatcatcctgttcgaggatctgagcaactacaacccctacgaggaaaggtcccgcttcgagaacagcaagctcatgaagtggtccagacgcgagatccccagacaggttgcactgcagggcgagatctatggcctgcaagtgggagaagtgggcgctcagttcagcagcagattccacgccaagacaggcagccctggcatcagatgtagcgtcgtgaccaaagagaagctgcaggacaatcggttcttcaagaatctgcagagagagggcagactgaccctggacaaaatcgccgtgctgaaagagggcgatctgtacccagacaaaggcggcgagaagttcatcagcctgagcaaggatcggaagtgcgtgaccacacacgccgacatcaacgccgctcagaacctgcagaagcggttctggacaagaacccacggcttctacaaggtgtactgcaaggcctaccaggtggacggaggctctggaggaagctccgaagtcgagttttcccatgagtactggatgagacacgcattgactctcgcaaagagggctcgagatgaacgcgaggtgcccgtgggggcagtactcgtgctcaacaatcgcgtaatcggcgaaggttggaatagggcaatcggactccacgaccccactgcacatgcggaaatcatggcccttcgacagggagggcttgtgatgcagaattatcgactttatgatgcgacgctgtacgtcacgtttgaaccttgcgtaatgtgcgcgggagctatgattcactcccgcattggacgagttgtattcggtgttcgcaacgccaagacgggtgccgcaggttcactgatggacgtgctgcatcatccaggcatgaaccaccgggtagaaatcacagaaggcatattggcggacgaatgtgcggcgctgttgtgtcgtttttttcgcatgcccaggcgggtctttaacgcccagaaaaaagcacaatcctctactgacggctcttctggatctgaaacacctggcacaagcgagagcgccacccctgagagctctggcggccagaccgtgtacatccctgagagcaaggaccagaagcagaagatcatcgaagagttcggcgagggctacttcattctgaaggacggggtgtacgaatgggtcaacgccggcaagctgaaaatcaagaagggcagctccaagcagagcagcagcgagctggtggatagcgacatcctgaaagacagcttcgacctggcctccgagctgaaaggcgaaaagctgatgctgtacagggaccccagcggcaatgtgttccccagcgacaaatggatggccgctggcgtgttcttcggaaagctggaacgcatcctgatcagcaagctgaccaaccagtactccatcagcaccatcgaggacgacagcagcaagcagtctatgaaaaggccggcggccacgaaaaaggccggccaggcaaaaaagaaaaagggatcctacccatacgatgttccagattacgcttatccctacgacgtgcctgattatgcatacccatatgatgtccccgactatgcctaa

SEQ ID NO: 9 - protein, 1361 aa, synthetic construct
  REGION 1..1361: note = BhCas12b GGSGGS-ABE8-Xten20at D980 polypeptide sequence
MAPKKKRKVGIHGVPAAATRSFILKIEPNEEVKKGLWKTHEVLNHGIAYYMNILKLIRQEAIYEHHEQDPKNPKKVSKAEIQAELWDFVLKMQKCNSFTHEVDKDEVFNILRELYEELVPSSVEKKGEANQLSNKFLYPLVDPNSQSGKGTASSGRKPRWYNLKIAGDPSWEEEKKKWEEDKKKDPLAKILGKLAEYGLIPLFIPYTDSNEPIVKEIKWMEKSRNQSVRRLDKDMFIQALERFLSWESWNLKVKEEYEKVEKEYKTLEERIKEDIQALKALEQYEKERQEQLLRDTLNTNEYRLSKRGLRGWREIIQKWLKMDENEPSEKYLEVFKDYQRKHPREAGDYSVYEFLSKKENHFIWRNHPEYPYLYATFCEIDKKKKDAKQQATFTLADPINHPLWVRFEERSGSNLNKYRILTEQLHTEKLKKKLTVQLDRLIYPTESGGWEEKGKVDIVLLPSRQFYNQIFLDIEEKGKHAFTYKDESIKFPLKGTLGGARVQFDRDHLRRYPHKVESGNVGRIYFNMTVNIEPTESPVSKSLKIHRDDFPKVVNFKPKELTEWIKDSKGKKLKSGIESLEIGLRVMSIDLGQRQAAAASIFEVVDQKPDIEGKLFFPIKGTELYAVHRASFNIKLPGETLVKSREVLRKAREDNLKLMNQKLNFLRNVLHFQQFEDITEREKRVTKWISRQENSDVPLVYQDELIQIRELMYKPYKDWVAFLKQLHKRLEVEIGKEVKHWRKSLSDGRKGLYGISLKNIDEIDRTRKFLLRWSLRPTEPGEVRRLEPGQRFAIDQLNHLNALKEDRLKKMANTIIMHALGYCYDVRKKKWQAKNPACQIILFEDLSNYNPYEERSRFENSKLMKWSRREIPRQVALQGEIYGLQVGEVGAQFSSRFHAKTGSPGIRCSVVTKEKLQDNRFFKNLQREGRLTLDKIAVLKEGDLYPDKGGEKFISLSKDRKCVTTHADINAAQNLQKRFWTRTHGFYKVYCKAYQVDGGSGGSSEVEFSHEYWMRHALTLAKRARDEREVPVGAVLVLNNRVIGEGWNRAIGLHDPTAHAEIMALRQGGLVMQNYRLYDATLYVTFEPCVMCAGAMIHSRIGRVVFGVRNAKTGAAGSLMDVLHHPGMNHRVEITEGILADECAALLCRFFRMPRRVFNAQKKAQSSTDGSSGSETPGTSESATPESSGGQTVYIPESKDQKQKIIEEFGEGYFILKDGVYEWVNAGKLKIKKGSSKQSSSELVDSDILKDSFDLASELKGEKLMLYRDPSGNVFPSDKWMAAGVFFGKLERILISKLTNQYSISTIEDDSSKQSMKRPAATKKAGQAKKKKGSYPYDVPDYAYPYDVPDYAYPYDVPDYA

SEQ ID NO: 10 - DNA, 4092 bp, synthetic construct
  misc_feature 1..4092: note = BhCas12b GGSGGS-ABE8-Xten20at K1019 polynucleotide sequence
  misc_feature 1..6: note = Kozak sequence
  misc_feature 7..57: note = Sequence encoding N-terminal nuclear localization signal (NLS)
  misc_feature 58..3114: note = Sequence encoding BhCas12b
  misc_feature 3115..3132: note = Sequence encoding a linker
  misc_feature 3133..3630: note = Sequence encoding TadA*8
  misc_feature 3631..3690: note = Sequence encoding Xten20 linker
  misc_feature 3691..3954: note = Sequence encoding BhCas12b
  misc_feature 3955..4002: note = Sequence encoding C-terminal NLS
  misc_feature 4003..4008: note = Sequence encoding GS linker
  misc_feature 4009..4089: note = Sequence encoding 3x hemagglutinin (HA) tag
  source 1..4092: mol_type = other DNA
gccaccatggccccaaagaagaagcggaaggtcggtatccacggagtcccagcagccgccaccagatccttcatcctgaagatcgagcccaacgaggaagtgaagaaaggcctctggaaaacccacgaggtgctgaaccacggaatcgcctactacatgaatatcctgaagctgatccggcaagaggccatctacgagcaccacgagcaggaccccaagaatcccaagaaggtgtccaaggccgagatccaggccgagctgtgggatttcgtgctgaagatgcagaagtgcaacagcttcacacacgaggtggacaaggacgaggtgttcaacatcctgagagagctgtacgaggaactggtgcccagcagcgtggaaaagaagggcgaagccaaccagctgagcaacaagtttctgtaccctctggtggaccccaacagccagtctggaaagggaacagccagcagcggcagaaagcccagatggtacaacctgaagattgccggcgatccctcctgggaagaagagaagaagaagtgggaagaagataagaaaaaggacccgctggccaagatcctgggcaagctggctgagtacggactgatccctctgttcatcccctacaccgacagcaacgagcccatcgtgaaagaaatcaagtggatggaaaagtcccggaaccagagcgtgcggcggctggataaggacatgttcattcaggccctggaacggttcctgagctgggagagctggaacctgaaagtgaaagaggaatacgagaaggtcgagaaagagtacaagaccctggaagagaggatcaaagaggacatccaggctctgaaggctctggaacagtatgagaaagagcggcaagaacagctgctgcgggacaccctgaacaccaacgagtaccggctgagcaagagaggccttagaggctggcgggaaatcatccagaaatggctgaaaatggacgagaacgagccctccgagaagtacctggaagtgttcaaggactaccagcggaagcaccctagagaggccggcgattacagcgtgtacgagttcctgtccaagaaagagaaccacttcatctggcggaatcaccctgagtacccctacctgtacgccaccttctgcgagatcgacaagaaaaagaaggacgccaagcagcaggccaccttcacactggccgatcctatcaatcaccctctgtgggtccgattcgaggaaagaagcggcagcaacctgaacaagtacagaatcctgaccgagcagctgcacaccgagaagctgaagaaaaagctgacagtgcagctggaccggctgatctaccctacagaatctggcggctgggaagagaagggcaaagtggacattgtgctgctgcccagccggcagttctacaaccagatcttcctggacatcgaggaaaagggcaagcacgccttcacctacaaggatgagagcatcaagttccctctgaagggcacactcggcggagccagagtgcagttcgacagagatcacctgagaagataccctcacaaggtggaaagcggcaacgtgggcagaatctacttcaacatgaccgtgaacatcgagcctacagagtccccagtgtccaagtctctgaagatccaccgggacgacttccccaaggtggtcaacttcaagcccaaagaactgaccgagtggatcaaggacagcaagggcaagaaactgaagtccggcatcgagtccctggaaatcggcctgagagtgatgagcatcgacctgggacagagacaggccgctgccgcctctattttcgaggtggtggatcagaagcccgacatcgaaggcaagctgtttttcccaatcaagggcaccgagctgtatgccgtgcacagagccagcttcaacatcaagctgcccggcgagacactggtcaagagcagagaagtgctgcggaaggccagagaggacaatctgaaactgatgaaccagaagctcaacttcctgcggaacgtgctgcacttccagcagttcgaggacatcaccgagagagagaagcgggtcaccaagtggatcagcagacaagagaacagcgacgtgcccctggtgtaccaggatgagctgatccagatccgcgagctgatgtacaagccttacaaggactgggtcgccttcctgaagcagctccacaagagactggaagtcgagatcggcaaagaagtgaagcactggcggaagtccctgagcgacggaagaaagggcctgtacggcatctccctgaagaacatcgacgagatcgatcggacccggaagttcctgctgagatggtccctgaggcctaccgaacctggcgaagtgcgtagactggaacccggccagagattcgccatcgaccagctgaatcacctgaacgccctgaaagaagatcggctgaagaagatggccaacaccatcatcatgcacgccctgggctactgctacgacgtgcggaagaagaaatggcaggctaagaaccccgcctgccagatcatcctgttcgaggatctgagcaactacaacccctacgaggaaaggtcccgcttcgagaacagcaagctcatgaagtggtccagacgcgagatccccagacaggttgcactgcagggcgagatctatggcctgcaagtgggagaagtgggcgctcagttcagcagcagattccacgccaagacaggcagccctggcatcagatgtagcgtcgtgaccaaagagaagctgcaggacaatcggttcttcaagaatctgcagagagagggcagactgaccctggacaaaatcgccgtgctgaaagagggcgatctgtacccagacaaaggcggcgagaagttcatcagcctgagcaaggatcggaagtgcgtgaccacacacgccgacatcaacgccgctcagaacctgcagaagcggttctggacaagaacccacggcttctacaaggtgtactgcaaggcctaccaggtggacggccagaccgtgtacatccctgagagcaaggaccagaagcagaagatcatcgaagagttcggcgagggctacttcattctgaaggacggggtgtacgaatgggtcaacgccggcaagggaggctctggaggaagctccgaagtcgagttttcccatgagtactggatgagacacgcattgactctcgcaaagagggctcgagatgaacgcgaggtgcccgtgggggcagtactcgtgctcaacaatcgcgtaatcggcgaaggttggaatagggcaatcggactccacgaccccactgcacatgcggaaatcatggcccttcgacagggagggcttgtgatgcagaattatcgactttatgatgcgacgctgtacgtcacgtttgaaccttgcgtaatgtgcgcgggagctatgattcactcccgcattggacgagttgtattcggtgttcgcaacgccaagacgggtgccgcaggttcactgatggacgtgctgcatcatccaggcatgaaccaccgggtagaaatcacagaaggcatattggcggacgaatgtgcggcgctgttgtgtcgtttttttcgcatgcccaggcgggtctttaacgcccagaaaaaagcacaatcctctactgacggctcttctggatctgaaacacctggcacaagcgagagcgccacccctgagagctctggcctgaaaatcaagaagggcagctccaagcagagcagcagcgagctggtggatagcgacatcctgaaagacagcttcgacctggcctccgagctgaaaggcgaaaagctgatgctgtacagggaccccagcggcaatgtgttccccagcgacaaatggatggccgctggcgtgttcttcggaaagctggaacgcatcctgatcagcaagctgaccaaccagtactccatcagcaccatcgaggacgacagcagcaagcagtctatgaaaaggccggcggccacgaaaaaggccggccaggcaaaaaagaaaaagggatcctacccatacgatgttccagattacgcttatccctacgacgtgcctgattatgcatacccatatgatgtccccgactatgcctaa

SEQ ID NO: 11 - protein, 1361 aa, synthetic construct
  REGION 1..1361: note = BhCas12b GGSGGS-ABE8-Xten20at K1019 polypeptide sequence
MAPKKKRKVGIHGVPAAATRSFILKIEPNEEVKKGLWKTHEVLNHGIAYYMNILKLIRQEAIYEHHEQDPKNPKKVSKAEIQAELWDFVLKMQKCNSFTHEVDKDEVFNILRELYEELVPSSVEKKGEANQLSNKFLYPLVDPNSQSGKGTASSGRKPRWYNLKIAGDPSWEEEKKKWEEDKKKDPLAKILGKLAEYGLIPLFIPYTDSNEPIVKEIKWMEKSRNQSVRRLDKDMFIQALERFLSWESWNLKVKEEYEKVEKEYKTLEERIKEDIQALKALEQYEKERQEQLLRDTLNTNEYRLSKRGLRGWREIIQKWLKMDENEPSEKYLEVFKDYQRKHPREAGDYSVYEFLSKKENHFIWRNHPEYPYLYATFCEIDKKKKDAKQQATFTLADPINHPLWVRFEERSGSNLNKYRILTEQLHTEKLKKKLTVQLDRLIYPTESGGWEEKGKVDIVLLPSRQFYNQIFLDIEEKGKHAFTYKDESIKFPLKGTLGGARVQFDRDHLRRYPHKVESGNVGRIYFNMTVNIEPTESPVSKSLKIHRDDFPKVVNFKPKELTEWIKDSKGKKLKSGIESLEIGLRVMSIDLGQRQAAAASIFEVVDQKPDIEGKLFFPIKGTELYAVHRASFNIKLPGETLVKSREVLRKAREDNLKLMNQKLNFLRNVLHFQQFEDITEREKRVTKWISRQENSDVPLVYQDELIQIRELMYKPYKDWVAFLKQLHKRLEVEIGKEVKHWRKSLSDGRKGLYGISLKNIDEIDRTRKFLLRWSLRPTEPGEVRRLEPGQRFAIDQLNHLNALKEDRLKKMANTIIMHALGYCYDVRKKKWQAKNPACQIILFEDLSNYNPYEERSRFENSKLMKWSRREIPRQVALQGEIYGLQVGEVGAQFSSRFHAKTGSPGIRCSVVTKEKLQDNRFFKNLQREGRLTLDKIAVLKEGDLYPDKGGEKFISLSKDRKCVTTHADINAAQNLQKRFWTRTHGFYKVYCKAYQVDGQTVYIPESKDQKQKIIEEFGEGYFILKDGVYEWVNAGKGGSGGSSEVEFSHEYWMRHALTLAKRARDEREVPVGAVLVLNNRVIGEGWNRAIGLHDPTAHAEIMALRQGGLVMQNYRLYDATLYVTFEPCVMCAGAMIHSRIGRVVFGVRNAKTGAAGSLMDVLHHPGMNHRVEITEGILADECAALLCRFFRMPRRVFNAQKKAQSSTDGSSGSETPGTSESATPESSGLKIKKGSSKQSSSELVDSDILKDSFDLASELKGEKLMLYRDPSGNVFPSDKWMAAGVFFGKLERILISKLTNQYSISTIEDDSSKQSMKRPAATKKAGQAKKKKGSYPYDVPDYAYPYDVPDYAYPYDVPDYA

SEQ ID NO: 12 - protein, 208 aa, Petromyzon marinus
  REGION 1..208: note = MISC_FEATURE - tr|A5H718|A5H718_PETMA Cytosine deaminase OS=Petromyzon marinusOX=7757 PE=2 SV=1 amino acid sequence; PmCDA1 polypeptide sequence
MTDAEYVRIHEKLDIYTFKKQFFNNKKSVSHRCYVLFELKRRGERRACFWGYAVNKPQSGTERGIHAEIFSIRKVEEYLRDNPGQFTINWYSSWSPCADCAEKILEWYNQELRGNGHTLKIWACKLYYEKNARNQIGLWNLRDNGVGLNVMVSEHYQCCRKIFIQSSHNQLNENRWLEKTLKRAEKRRSELSIMIQVKILHTTKSPAV

SEQ ID NO: 13 - DNA, 766 bp, Petromyzon marinus
  misc_feature 1..766: note = EF094822.1 Petromyzon marinus isolate PmCDA.21 cytosine deaminase mRNA, complete cds; PmCDA1 polynucleotide sequence
  source 1..766: mol_type = genomic DNA
tgacacgacacagccgtgtatatgaggaagggtagctggatggggggggggggaatacgttcagagaggacattagcgagcgtcttgttggtggccttgagtctagacacctgcagacatgaccgacgctgagtacgtgagaatccatgagaagttggacatctacacgtttaagaaacagtttttcaacaacaaaaaatccgtgtcgcatagatgctacgttctctttgaattaaaacgacggggtgaacgtagagcgtgtttttggggctatgctgtgaataaaccacagagcgggacagaacgtggaattcacgccgaaatctttagcattagaaaagtcgaagaatacctgcgcgacaaccccggacaattcacgataaattggtactcatcctggagtccttgtgcagattgcgctgaaaagatcttagaatggtataaccaggagctgcgggggaacggccacactttgaaaatctgggcttgcaaactctattacgagaaaaatgcgaggaatcaaattgggctgtggaacctcagagataacggggttgggttgaatgtaatggtaagtgaacactaccaatgttgcaggaaaatattcatccaatcgtcgcacaatcaattgaatgagaatagatggcttgagaagactttgaagcgagctgaaaaacgacggagcgagttgtccattatgattcaggtaaaaatactccacaccactaagagtcctgctgtttaagaggctatgcggatggttttc

SEQ ID NO: 14 - protein, 145 aa, Homo sapiens
  REGION 1..145: note = MISC_FEATURE - tr|Q6QJ80|Q6QJ80_HUMAN Activation-induced cytidine deaminase OS=Homo sapiens; OX = 9606 GN=AICDA PE=2 SV=1; AID polypeptide sequence
MDSLLMNRRKFLYQFKNVRWAKGRRETYLCYVVKRRDSATSFSLDFGYLRNKNGCHVELLFLRYISDWDLDPGRCYRVTWFTSWSPCYDCARHVADFLRGNPNLSLRIFTARLYFCEDRKAEPEGLRRLHRAGVQIAIMTFKAPV

SEQ ID NO: 15 - DNA, 10681 bp, Homo sapiens
  misc_feature 1..10681: note = NG_011588.1:5001-15681 Homo sapiens activation induced cytidine deaminase (AICDA), RefSeqGene (LRG_17) on chromosome 12; nucleic acid sequence of the CDS of human AID; polynucleotide sequence
  source 1..10681: mol_type = genomic DNA
agagaaccatcattaattgaagtgagatttttctggcctgagacttgcagggaggcaagaagacactctggacaccactatggacaggtaaagaggcagtcttctcgtgggtgattgcactggccttcctctcagagcaaatctgagtaatgagactggtagctatccctttctctcatgtaactgtctgactgataagatcagcttgatcaatatgcatatatattttttgatctgtctccttttcttctattcagatcttatacgctgtcagcccaattctttctgtttcagacttctcttgatttccctctttttcatgtggcaaaagaagtagtgcgtacaatgtactgattcgtcctgagatttgtaccatggttgaaactaatttatggtaataatattaacatagcaaatctttagagactcaaatcatgaaaaggtaatagcagtactgtactaaaaacggtagtgctaattttcgtaataattttgtaaatattcaacagtaaaacaacttgaagacacactttcctagggaggcgttactgaaataatttagctatagtaagaaaatttgtaattttagaaatgccaagcattctaaattaattgcttgaaagtcactatgattgtgtccattataaggagacaaattcattcaagcaagttatttaatgttaaaggcccaattgttaggcagttaatggcacttttactattaactaatctttccatttgttcagacgtagcttaacttacctcttaggtgtgaatttggttaaggtcctcataatgtctttatgtgcagtttttgataggttattgtcatagaacttattctattcctacatttatgattactatggatgtatgagaataacacctaatccttatactttacctcaatttaactcctttataaagaacttacattacagaataaagattttttaaaaatatatttttttgtagagacagggtcttagcccagccgaggctggtctctaagtcctggcccaagcgatcctcctgcctgggcctcctaaagtgctggaattatagacatgagccatcacatccaatatacagaataaagatttttaatggaggatttaatgttcttcagaaaattttcttgaggtcagacaatgtcaaatgtctcctcagtttacactgagattttgaaaacaagtctgagctataggtccttgtgaagggtccattggaaatacttgttcaaagtaaaatggaaagcaaaggtaaaatcagcagttgaaattcagagaaagacagaaaaggagaaaagatgaaattcaacaggacagaagggaaatatattatcattaaggaggacagtatctgtagagctcattagtgatggcaaaatgacttggtcaggattatttttaacccgcttgtttctggtttgcacggctggggatgcagctagggttctgcctcagggagcacagctgtccagagcagctgtcagcctgcaagcctgaaacactccctcggtaaagtccttcctactcaggacagaaatgacgagaacagggagctggaaacaggcccctaaccagagaagggaagtaatggatcaacaaagttaactagcaggtcaggatcacgcaattcatttcactctgactggtaacatgtgacagaaacagtgtaggcttattgtattttcatgtagagtaggacccaaaaatccacccaaagtcctttatctatgccacatccttcttatctatacttccaggacactttttcttccttatgataaggctctctctctctccacacacacacacacacacacacacacacacacacacacacacacaaacacacaccccgccaaccaaggtgcatgtaaaaagatgtagattcctctgcctttctcatctacacagcccaggagggtaagttaatataagagggatttattggtaagagatgatgcttaatctgtttaacactgggcctcaaagagagaatttcttttcttctgtacttattaagcacctattatgtgttgagcttatatatacaaagggttattatatgctaatatagtaatagtaatggtggttggtactatggtaattaccataaaaattattatccttttaaaataaagctaattattattggatcttttttagtattcattttatgttttttatgtttttgattttttaaaagacaatctcaccctgttacccaggctggagtgcagtggtgcaatcatagctttctgcagtcttgaactcctgggctcaagcaatcctcctgccttggcctcccaaagtgttgggatacagtcatgagccactgcatctggcctaggatccatttagattaaaatatgcattttaaattttaaaataatatggctaatttttaccttatgtaatgtgtatactggcaataaatctagtttgctgcctaaagtttaaagtgctttccagtaagcttcatgtacgtgaggggagacatttaaagtgaaacagacagccaggtgtggtggctcacgcctgtaatcccagcactctgggaggctgaggtgggtggatcgcttgagccctggagttcaagaccagcctgagcaacatggcaaaacgctgtttctataacaaaaattagccgggcatggtggcatgtgcctgtggtcccagctactagggggctgaggcaggagaatcgttggagcccaggaggtcaaggctgcactgagcagtgcttgcgccactgcactccagcctgggtgacaggaccagaccttgcctcaaaaaaataagaagaaaaattaaaaataaatggaaacaactacaaagagctgttgtcctagatgagctacttagttaggctgatattttggtatttaacttttaaagtcagggtctgtcacctgcactacattattaaaatatcaattctcaatgtatatccacacaaagactggtacgtgaatgttcatagtacctttattcacaaaaccccaaagtagagactatccaaatatccatcaacaagtgaacaaataaacaaaatgtgctatatccatgcaatggaataccaccctgcagtacaaagaagctacttggggatgaatcccaaagtcatgacgctaaatgaaagagtcagacatgaaggaggagataatgtatgccatacgaaattctagaaaatgaaagtaacttatagttacagaaagcaaatcagggcaggcatagaggctcacacctgtaatcccagcactttgagaggccacgtgggaagattgctagaactcaggagttcaagaccagcctgggcaacacagtgaaactccattctccacaaaaatgggaaaaaaagaaagcaaatcagtggttgtcctgtggggaggggaaggactgcaaagagggaagaagctctggtggggtgagggtggtgattcaggttctgtatcctgactgtggtagcagtttggggtgtttacatccaaaaatattcgtagaattatgcatcttaaatgggtggagtttactgtatgtaaattatacctcaatgtaagaaaaaataatgtgtaagaaaactttcaattctcttgccagcaaacgttattcaaattcctgagccctttacttcgcaaattctctgcacttctgccccgtaccattaggtgacagcactagctccacaaattggataaatgcatttctggaaaagactagggacaaaatccaggcatcacttgtgctttcatatcaaccatgctgtacagcttgtgttgctgtctgcagctgcaatggggactcttgatttctttaaggaaacttgggttaccagagtatttccacaaatgctattcaaattagtgcttatgatatgcaagacactgtgctaggagccagaaaacaaagaggaggagaaatcagtcattatgtgggaacaacatagcaagatatttagatcattttgactagttaaaaaagcagcagagtacaaaatcacacatgcaatcagtataatccaaatcatgtaaatatgtgcctgtagaaagactagaggaataaacacaagaatcttaacagtcattgtcattagacactaagtctaattattattattagacactatgatatttgagatttaaaaaatctttaatattttaaaatttagagctcttctatttttccatagtattcaagtttgacaatgatcaagtattactctttctttttttttttttttttttttttttgagatggagttttggtcttgttgcccatgctggagtggaatggcatgaccatagctcactgcaacctccacctcctgggttcaagcaaagctgtcgcctcagcctcccgggtagatgggattacaggcgcccaccaccacactcggctaatgtttgtatttttagtagagatggggtttcaccatgttggccaggctggtctcaaactcctgacctcagaggatccacctgcctcagcctcccaaagtgctgggattacagatgtaggccactgcgcccggccaagtattgctcttatacattaaaaaacaggtgtgagccactgcgcccagccaggtattgctcttatacattaaaaaataggccggtgcagtggctcacgcctgtaatcccagcactttgggaagccaaggcgggcagaacacccgaggtcaggagtccaaggccagcctggccaagatggtgaaaccccgtctctattaaaaatacaaacattacctgggcatgatggtgggcgcctgtaatcccagctactcaggaggctgaggcaggaggatccgcggagcctggcagatctgcctgagcctgggaggttgaggctacagtaagccaagatcatgccagtatacttcagcctgggcgacaaagtgagaccgtaacaaaaaaaaaaaaatttaaaaaaagaaatttagatcaagatccaactgtaaaaagtggcctaaacaccacattaaagagtttggagtttattctgcaggcagaagagaaccatcagggggtcttcagcatgggaatggcatggtgcacctggtttttgtgagatcatggtggtgacagtgtggggaatgttattttggagggactggaggcagacagaccggttaaaaggccagcacaacagataaggaggaagaagatgagggcttggaccgaagcagagaagagcaaacagggaaggtacaaattcaagaaatattggggggtttgaatcaacacatttagatgattaattaaatatgaggactgaggaataagaaatgagtcaaggatggttccaggctgctaggctgcttacctgaggtggcaaagtcgggaggagtggcagtttaggacagggggcagttgaggaatattgttttgatcattttgagtttgaggtacaagttggacacttaggtaaagactggaggggaaatctgaatatacaattatgggactgaggaacaagtttattttattttttgtttcgttttcttgttgaagaacaaatttaattgtaatcccaagtcatcagcatctagaagacagtggcaggaggtgactgtcttgtgggtaagggtttggggtccttgatgagtatctctcaattggccttaaatataagcaggaaaaggagtttatgatggattccaggctcagcagggctcaggagggctcaggcagccagcagaggaagtcagagcatcttctttggtttagcccaagtaatgacttccttaaaaagctgaaggaaaatccagagtgaccagattataaactgtactcttgcattttctctccctcctctcacccacagcctcttgatgaaccggaggaagtttctttaccaattcaaaaatgtccgctgggctaagggtcggcgtgagacctacctgtgctacgtagtgaagaggcgtgacagtgctacatccttttcactggactttggttatcttcgcaataaggtatcaattaaagtcggctttgcaagcagtttaatggtcaactgtgagtgcttttagagccacctgctgatggtattacttccatccttttttggcatttgtgtctctatcacattcctcaaatccttttttttatttctttttccatgtccatgcacccatattagacatggcccaaaatatgtgatttaattcctccccagtaatgctgggcaccctaataccactccttccttcagtgccaagaacaactgctcccaaactgtttaccagctttcctcagcatctgaattgcctttgagattaattaagctaaaagcatttttatatgggagaatattatcagcttgtccaagcaaaaattttaaatgtgaaaaacaaattgtgtcttaagcatttttgaaaattaaggaagaagaatttgggaaaaaattaacggtggctcaattctgtcttccaaatgatttcttttccctcctactcacatgggtcgtaggccagtgaatacattcaacatggtgatccccagaaaactcagagaagcctcggctgatgattaattaaattgatctttcggctacccgagagaattacatttccaagagacttcttcaccaaaatccagatgggtttacataaacttctgcccacgggtatctcctctctcctaacacgctgtgacgtctgggcttggtggaatctcagggaagcatccgtggggtggaaggtcatcgtctggctcgttgtttgatggttatattaccatgcaattttctttgcctacatttgtattgaatacatcccaatctccttcctattcggtgacatgacacattctatttcagaaggctttgattttatcaagcactttcatttacttctcatggcagtgcctattacttctcttacaatacccatctgtctgctttaccaaaatctatttccccttttcagatcctcccaaatggtcctcataaactgtcctgcctccacctagtggtccaggtatatttccacaatgttacatcaacaggcacttctagccattttccttctcaaaaggtgcaaaaagcaacttcataaacacaaattaaatcttcggtgaggtagtgtgatgctgcttcctcccaactcagcgcacttcgtcttcctcattccacaaaaacccatagccttccttcactctgcaggactagtgctgccaagggttcagctctacctactggtgtgctcttttgagcaagttgcttagcctctctgtaacacaaggacaatagctgcaagcatccccaaagatcattgcaggagacaatgactaaggctaccagagccgcaataaaagtcagtgaattttagcgtggtcctctctgtctctccagaacggctgccacgtggaattgctcttcctccgctacatctcggactgggacctagaccctggccgctgctaccgcgtcacctggttcacctcctggagcccctgctacgactgtgcccgacatgtggccgactttctgcgagggaaccccaacctcagtctgaggatcttcaccgcgcgcctctacttctgtgaggaccgcaaggctgagcccgaggggctgcggcggctgcaccgcgccggggtgcaaatagccatcatgaccttcaaaggtgcgaaagggccttccgcgcaggcgcagtgcagcagcccgcattcgggattgcgatgcggaatgaatgagttagtggggaagctcgaggggaagaagtgggcggggattctggttcacctctggagccgaaattaaagattagaagcagagaaaagagtgaatggctcagagacaaggccccgaggaaatgagaaaatggggccagggttgcttctttcccctcgatttggaacctgaactgtcttctacccccatatccccgcctttttttcctttttttttttttgaagattatttttactgctggaatacttttgtagaaaaccacgaaagaactttcaaagcctgggaagggctgcatgaaaattcagttcgtctctccagacagcttcggcgcatccttttggtaaggggcttcctcgctttttaaattttctttctttctctacagtcttttttggagtttcgtatatttcttatattttcttattgttcaatcactctcagttttcatctgatgaaaactttatttctcctccacatcagctttttcttctgctgtttcaccattcagagccctctgctaaggttccttttccctcccttttctttcttttgttgtttcacatctttaaatttctgtctctccccagggttgcgtttccttcctggtcagaattcttttctcctttttttttttttttttttttttttttaaacaaacaaacaaaaaacccaaaaaaactctttcccaatttactttcttccaacatgttacaaagccatccactcagtttagaagactctccggccccaccgacccccaacctcgttttgaagccattcactcaatttgcttctctctttctctacagcccctgtatgaggttgatgacttacgagacgcatttcgtactttgggactttgatagcaacttccaggaatgtcacacacgatgaaatatctctgctgaagacagtggataaaaaacagtccttcaagtcttctctgtttttattcttcaactctcactttcttagagtttacagaaaaaatatttatatacgactctttaaaaagatctatgtcttgaaaatagagaaggaacacaggtctggccagggacgtgctgcaattggtgcagttttgaatgcaacattgtcccctactgggaataacagaactgcaggacctgggagcatcctaaagtgtcaacgtttttctatgacttttaggtaggatgagagcagaaggtagatcctaaaaagcatggtgagaggatcaaatgtttttatatcaacatcctttattatttgattcatttgagttaacagtggtgttagtgatagatttttctattcttttcccttgacgtttactttcaagtaacacaaactcttccatcaggccatgatctataggacctcctaatgagagtatctgggtgattgtgaccccaaaccatctctccaaagcattaatatccaatcatgcgctgtatgttttaatcagcagaagcatgtttttatgtttgtacaaaagaagattgttatgggtggggatggaggtatagaccatgcatggtcaccttcaagctactttaataaaggatcttaaaatgggcaggaggactgtgaacaagacaccctaataatgggttgatgtctgaagtagcaaatcttctggaaacgcaaactcttttaaggaagtccctaatttagaaacacccacaaacttcacatatcataattagcaaacaattggaaggaagttgcttgaatgttggggagaggaaaatctattggctctcgtgggtctcttcatctcagaaatgccaatcaggtcaaggtttgctacattttgtatgtgtgtgatgcttctcccaaaggtatattaactatataagagagttgtgacaaaacagaatgataaagctgcgaaccgtggcacacgctcatagttctagctgcttgggaggttgaggagggaggatggcttgaacacaggtgttcaaggccagcctgggcaacataacaagatcctgtctctcaaaaaaaaaaaaaaaaaaaagaaagagagagggccgggcgtggtggctcacgcctgtaatcccagcactttgggaggccgagccgggcggatcacctgtggtcaggagtttgagaccagcctggccaacatggcaaaaccccgtctgtactcaaaatgcaaaaattagccaggcgtggtagcaggcacctgtaatcccagctacttgggaggctgaggcaggagaatcgcttgaacccaggaggtggaggttgcagtaagctgagatcgtgccgttgcactccagcctgggcgacaagagcaagactctgtctcagaaaaaaaaaaaaaaaagagagagagagagaaagagaacaatatttgggagagaaggatggggaagcattgcaaggaaattgtgctttatccaacaaaatgtaaggagccaataagggatccctatttgtctcttttggtgtctatttgtccctaacaactgtctttgacagtgagaaaaatattcagaataaccatatccctgtgccgttattacctagcaacccttgcaatgaagatgagcagatccacaggaaaacttgaatgcacaactgtcttattttaatcttattgtacataagtttgtaaaagagttaaaaattgttacttcatgtattcatttatattttatattattttgcgtctaatgattttttattaacatgatttccttttctgatatattgaaatggagtctcaaagcttcataaatttataactttagaaatgattctaataacaacgtatgtaattgtaacattgcagtaatggtgctacgaagccatttctcttgatttttagtaaacttttatgacagcaaatttgcttctggctcactttcaatcagttaaataaatgataaataattttggaagctgtgaagataaaataccaaataaaataatataaaagtgatttatatgaagttaaaataaaaaatcagtatgatggaataaacttg

SEQ ID NO: 16 - protein, 198 aa, Homo sapiens [sequence omitted]

SEQ ID NO: 17 - protein, 198 aa, Canis lupus
  REGION 1..198: note = MISC_FEATURE - Canine AID (clAID) polypeptide sequence
  REGION 1..30: note = MISC_FEATURE - Nuclear localization sequence
  REGION 183..198: note = MISC_FEATURE - Nuclear export signal
MDSLLMKQRKFLYHFKNVRWAKGRHETYLCYVVKRRDSATSFSLDFGHLRNKSGCHVELLFLRYISDWDLDPGRCYRVTWFTSWSPCYDCARHVADFLRGYPNLSLRIFAARLYFCEDRKAEPEGLRRLHRAGVQIAIMTFKDYFYCWNTFVENREKTFKAWEGLHENSVRLSRQLRRILLPLYEVDDLRDAFRTLGL

SEQ ID NO: 18 - protein, 199 aa, Bos taurus
  REGION 1..199: note = MISC_FEATURE - Bovine AID (btAID) polypeptide sequence
  REGION 1..30: note = MISC_FEATURE - Nuclear localization sequence
  REGION 183..199: note = MISC_FEATURE - Nuclear export signal
MDSLLKKQRQFLYQFKNVRWAKGRHETYLCYVVKRRDSPTSFSLDFGHLRNKAGCHVELLFLRYISDWDLDPGRCYRVTWFTSWSPCYDCARHVADFLRGYPNLSLRIFTARLYFCDKERKAEPEGLRRLHRAGVQIAIMTFKDYFYCWNTFVENHERTFKAWEGLHENSVRLSRQLRRILLPLYEVDDLRDAFRTLGL

SEQ ID NO: 19 - protein, 239 aa, Rattus sp.
  REGION 1..239: note = MISC_FEATURE - Rat AID polypeptide sequence
  REGION 1..26: note = MISC_FEATURE - Nuclear localization sequence
  REGION 194..239: note = MISC_FEATURE - Nuclear export signal
MAVGSKPKAALVGPHWERERIWCFLCSTGLGTQQTGQTSRWLRPAATQDPVSPPRSLLMKQRKFLYHFKNVRWAKGRHETYLCYVVKRRDSATSFSLDFGYLRNKSGCHVELLFLRYISDWDLDPGRCYRVTWFTSWSPCYDCARHVADFLRGNPNLSLRIFTARLTGWGALPAGLMSPARPSDYFYCWNTFVENHERTFKAWEGLHENSVRLSRRLRRILLPLYEVDDLRDAFRTLGL

SEQ ID NO: 20 - protein, 198 aa, Mus musculus [sequence omitted]

SEQ ID NO: 21 - protein, 229 aa, Rattus norvegicus [sequence omitted]

SEQ ID NO: 22 - protein, 229 aa, Mesocricetus auratus
  REGION 1..229: note = MISC_FEATURE - maAPOBEC-1 polypeptide sequence
MSSETGPVVVDPTLRRRIEPHEFDAFFDQGELRKETCLLYEIRWGGRHNIWRHTGQNTSRHVEINFIEKFTSERYFYPSTRCSIVWFLSWSPCGECSKAITEFLSGHPNVTLFIYAARLYHHTDQRNRQGLRDLISRGVTIRIMTEQEYCYCWRNFVNYPPSNEVYWPRYPNLWMRLYALELYCIHLGLPPCLKIKRRHQYPLTFFRLNLQSCHYQRIPPHILWATGFI

SEQ ID NO: 23 - protein, 236 aa, Pongo pygmaeus
  REGION 1..236: note = MISC_FEATURE - ppAPOBEC-1 polypeptide sequence
MTSEKGPSTGDPTLRRRIESWEFDVFYDPRELRKETCLLYEIKWGMSRKIWRSSGKNTTNHVEVNFIKKFTSERRFHSSISCSITWFLSWSPCWECSQAIREFLSQHPGVTLVIYVARLFWHMDQRNRQGLRDLVNSGVTIQIMRASEYYHCWRNFVNYPPGDEAHWPQYPPLWMMLYALELHCIILSLPPCLKISRRWQNHLAFFRLHLQNCHYQTIPPHILLATGLIHPSVTWR

SEQ ID NO: 24 - protein, 236 aa, Oryctolagus cuniculus
  REGION 1..236: note = MISC_FEATURE - ocAPOBEC1 polypeptide sequence
MASEKGPSNKDYTLRRRIEPWEFEVFFDPQELRKEACLLYEIKWGASSKTWRSSGKNTTNHVEVNFLEKLTSEGRLGPSTCCSITWFLSWSPCWECSMAIREFLSQHPGVTLIIFVARLFQHMDRRNRQGLKDLVTSGVTVRVMSVSEYCYCWENFVNYPPGKAAQWPRYPPRWMLMYALELYCIILGLPPCLKISRRHQKQLTFFSLTPQYCHYKMIPPYILLATGLLQPSVPWR

SEQ ID NO: 25 - protein, 235 aa, Monodelphis domestica
  REGION 1..235: note = MISC_FEATURE - mdAPOBEC-1 polypeptide sequence
MNSKTGPSVGDATLRRRIKPWEFVAFFNPQELRKETCLLYEIKWGNQNIWRHSNQNTSQHAEINFMEKFTAERHFNSSVRCSITWFLSWSPCWECSKAIRKFLDHYPNVTLAIFISRLYWHMDQQHRQGLKELVHSGVTIQIMSYSEYHYCWRNFVDYPQGEEDYWPKYPYLWIMLYVLELHCIILGLPPCLKISGSHSNQLALFSLDLQDCHYQKIPYNVLVATGLVQPFVTWR

SEQ ID NO: 26 - protein, 224 aa, Pongo pygmaeus
  REGION 1..224: note = MISC_FEATURE - ppAPOBEC-2 polypeptide sequence
MAQKEEAAAATEAASQNGEDLENLDDPEKLKELIELPPFEIVTGERLPANFFKFQFRNVEYSSGRNKTFLCYVVEAQGKGGQVQASRGYLEDEHAAAHAEEAFFNTILPAFDPALRYNVTWYVSSSPCAACADRIIKTLSKTKNLRLLILVGRLFMWEELEIQDALKKLKEAGCKLRIMKPQDFEYVWQNFVEQEEGESKAFQPWEDIQENFLYYEEKLADILK

SEQ ID NO: 27 - protein, 224 aa, Bos taurus
  REGION 1..224: note = MISC_FEATURE - btAPOBEC-2 polypeptide sequence
MAQKEEAAAAAEPASQNGEEVENLEDPEKLKELIELPPFEIVTGERLPAHYFKFQFRNVEYSSGRNKTFLCYVVEAQSKGGQVQASRGYLEDEHATNHAEEAFFNSIMPTFDPALRYMVTWYVSSSPCAACADRIVKTLNKTKNLRLLILVGRLFMWEEPEIQAALRKLKEAGCRLRIMKPQDFEYIWQNFVEQEEGESKAFEPWEDIQENFLYYEEKLADILK

SEQ ID NO: 28 - protein, 440 aa, Mus musculus
  REGION 1..440: note = MISC_FEATURE - mAPOBEC-3-(1) polypeptide sequence
MQPQRLGPRAGMGPFCLGCSHRKCYSPIRNLISQETFKFHFKNLGYAKGRKDTFLCYEVTRKDCDSPVSLHHGVFKNKDNIHAEICFLYWFHDKVLKVLSPREEFKITWYMSWSPCFECAEQIVRFLATHHNLSLDIFSSRLYNVQDPETQQNLCRLVQEGAQVAAMDLYEFKKCWKKFVDNGGRRFRPWKRLLTNFRYQDSKLQEILRPCYISVPSSSSSTLSNICLTKGLPETRFWVEGRRMDPLSEEEFYSQFYNQRVKHLCYYHRMKPYLCYQLEQFNGQAPLKGCLLSEKGKQHAEILFLDKIRSMELSQVTITCYLTWSPCPNCAWQLAAFKRDRPDLILHIYTSRLYFHWKRPFQKGLCSLWQSGILVDVMDLPQFTDCWTNFVNPKRPFWPWKGLEIISRRTQRRLRRIKESWGLQDLVNDFGNLQLGPPMS

SEQ ID NO: 29 - protein, 429 aa, Mus musculus
  REGION 1..429: note = MISC_FEATURE - APOBEC-3-(2) (Mouse APOBEC-3) polypeptide sequence
  REGION 71..108: note = MISC_FEATURE - Nucleic acid editing domain
  REGION 288..319: note = MISC_FEATURE - Nucleic acid editing domain
MGPFCLGCSHRKCYSPIRNLISQETFKFHFKNLGYAKGRKDTFLCYEVTRKDCDSPVSLHHGVFKNKDNIHAEICFLYWFHDKVLKVLSPREEFKITWYMSWSPCFECAEQIVRFLATHHNLSLDIFSSRLYNVQDPETQQNLCRLVQEGAQVAAMDLYEFKKCWKKFVDNGGRRFRPWKRLLTNFRYQDSKLQEILRPCYIPVPSSSSSTLSNICLTKGLPETRFCVEGRRMDPLSEEEFYSQFYNQRVKHLCYYHRMKPYLCYQLEQFNGQAPLKGCLLSEKGKQHAEILFLDKIRSMELSQVTITCYLTWSPCPNCAWQLAAFKRDRPDLILHIYTSRLYFHWKRPFQKGLCSLWQSGILVDVMDLPQFTDCWTNFVNPKRPFWPWKGLEIISRRTQRRLRRIKESWGLQDLVNDFGNLQLGPPMS

SEQ ID NO: 30 - protein, 430 aa, Rattus sp.
  REGION 1..430: note = MISC_FEATURE - APOBEC-3 polypeptide sequence
  REGION 72..109: note = MISC_FEATURE - Nucleic acid editing domain
  REGION 289..320: note = MISC_FEATURE - Nucleic acid editing domain
MGPFCLGCSHRKCYSPIRNLISQETFKFHFKNRLRYAIDRKDTFLCYEVTRKDCDSPVSLHHGVFKNKDNIHAEICFLYWFHDKVLKVLSPREEFKITWYMSWSPCFECAEQVLRFLATHHNLSLDIFSSRLYNIRDPENQQNLCRLVQEGAQVAAMDLYEFKKCWKKFVDNGGRRFRPWKKLLTNFRYQDSKLQEILRPCYIPVPSSSSSTLSNICLTKGLPETRFCVERRRVHLLSEEEFYSQFYNQRVKHLCYYHGVKPYLCYQLEQFNGQAPLKGCLLSEKGKQHAEILFLDKIRSMELSQVIITCYLTWSPCPNCAWQLAAFKRDRPDLILHIYTSRLYFHWKRPFQKGLCSLWQSGILVDVMDLPQFTDCWTNFVNPKRPFWPWKGLEIISRRTQRRLHRIKESWGLQDLVNDFGNLQLGPPMS

SEQ ID NO: 31 - protein, 199 aa, Homo sapiens
  REGION 1..199: note = MISC_FEATURE - hAPOBEC-3A polypeptide sequence
  REGION 70..106: note = MISC_FEATURE - Nucleic acid editing domain
MEASPASGPRHLMDPHIFTSNFNNGIGRHKTYLCYEVERLDNGTSVKMDQHRGFLHNQAKNLLCGFYGRHAELRFLDLVPSLQLDPAQIYRVTWFISWSPCFSWGCAGEVRAFLQENTHVRLRIFAARIYDYDPLYKEALQMLRDAGAQVSIMTYDEFKHCWDTFVDHQGCPFQPWDGLDEHSQALSGRLRAILQNQGN

SEQ ID NO: 32 - protein, 373 aa, Homo sapiens
  REGION 1..373: note = MISC_FEATURE - hAPOBEC-3F polypeptide sequence
  REGION 65..99: note = MISC_FEATURE - Nucleic acid editing domain
  REGION 248..283: note = MISC_FEATURE - Nucleic acid editing domain
MKPHFRNTVERMYRDTFSYNFYNRPILSRRNTVWLCYEVKTKGPSRPRLDAKIFRGQVYSQPEHHAEMCFLSWFCGNQLPAYKCFQITWFVSWTPCPDCVAKLAEFLAEHPNVTLTISAARLYYYWERDYRRALCRLSQAGARVKIMDDEEFAYCWENFVYSEGQPFMPWYKFDDNYAFLHRTLKEILRNPMEAMYPHIFYFHFKNLRKAYGRNESWLCFTMEVVKHHSPVSWKRGVFRNQVDPETHCHAERCFLSWFCDDILSPNTNYEVTWYTSWSPCPECAGEVAEFLARHSNVNLTIFTARLYYFWDTDYQEGLRSLSQEGASVEIMGYKDFKYCWENFVYNDDEPFKPWKGLKYNFLFLDSKLQEILE

SEQ ID NO: 33 - protein, 370 aa, Macaca mulatta
  REGION 1..370: note = MISC_FEATURE - Rhesus macaque APOBEC-3G polypeptide sequence
  REGION 1..61: note = MISC_FEATURE - Cytoplasmic localization signal
MVEPMDPRTFVSNFNNRPILSGLNTVWLCCEVKTKDPSGPPLDAKIFQGKVYSKAKYHPEMRFLRWFHKWRQLHHDQEYKVTWYVSWSPCTRCANSVATFLAKDPKVTLTIFVARLYYFWKPDYQQALRILCQKRGGPHATMKIMNYNEFQDCWNKFVDGRGKPFKPRNNLPKHYTLLQATLGELLRHLMDPGTFTSNFNNKPWVSGQHETYLCYKVERLHNDTWVPLNQHRGFLRNQAPNIHGFPKGRHAELCFLDLIPFWKLDGQQYRVTCFTSWSPCFSCAQEMAKFISNNEHVSLCIFAARIYDDQGRYQEGLRALHRDGAKIAMMNYSEFEYCWDTFVDRQGRPFQPWDGLDEHSQALSGRLRAI

SEQ ID NO: 34 - protein, 384 aa, Pan troglodytes
  REGION 1..384: note = MISC_FEATURE - Chimpanzee APOBEC-3G polypeptide sequence
  REGION 1..60: note = MISC_FEATURE - Cytoplasmic localization signal
  REGION 65..100: note = MISC_FEATURE - Nucleic acid editing domain
  REGION 257..291: note = MISC_FEATURE - Nucleic acid editing domain
MKPHFRNPVERMYQDTFSDNFYNRPILSHRNTVWLCYEVKTKGPSRPPLDAKIFRGQVYSKLKYHPEMRFFHWFSKWRKLHRDQEYEVTWYISWSPCTKCTRDVATFLAEDPKVTLTIFVARLYYFWDPDYQEALRSLCQKRDGPRATMKIMNYDEFQHCWSKFVYSQRELFEPWNNLPKYYILLHIMLGEILRHSMDPPTFTSNFNNELWVRGRHETYLCYEVERLHNDTWVLLNQRRGFLCNQAPHKHGFLEGRHAELCFLDVIPFWKLDLHQDYRVTCFTSWSPCFSCAQEMAKFISNNKHVSLCIFAARIYDDQGRCQEGLRTLAKAGAKISIMTYSEFKHCWDTFVDHQGCPFQPWDGLEEHSQALSGRLRAILQNQGN

SEQ ID NO: 35 - protein, 377 aa, Chlorocebus sabaeus
  REGION 1..377: note = MISC_FEATURE - Green monkey APOBEC-3G polypeptide sequence
  REGION 1..60: note = MISC_FEATURE - Cytoplasmic localization signal
  REGION 65..100: note = MISC_FEATURE - Nucleic acid editing domain
  REGION 257..290: note = MISC_FEATURE - Nucleic acid editing domain
MNPQIRNMVEQMEPDIFVYYFNNRPILSGRNTVWLCYEVKTKDPSGPPLDANIFQGKLYPEAKDHPEMKFLHWFRKWRQLHRDQEYEVTWYVSWSPCTRCANSVATFLAEDPKVTLTIFVARLYYFWKPDYQQALRILCQERGGPHATMKIMNYNEFQHCWNEFVDGQGKPFKPRKNLPKHYTLLHATLGELLRHVMDPGTFTSNFNNKPWVSGQRETYLCYKVERSHNDTWVLLNQHRGFLRNQAPDRHGFPKGRHAELCFLDLIPFWKLDDQQYRVTCFTSWSPCFSCAQKMAKFISNNKHVSLCIFAARIYDDQGRCQEGLRTLHRDGAKIAVMNYSEFEYCWDTFVDRQGRPFQPWDGLDEHSQALSGRLRAI

SEQ ID NO: 36 - protein, 384 aa, Homo sapiens
  REGION 1..384: note = MISC_FEATURE - Human APOBEC-3G polypeptide sequence
  REGION 1..60: note = MISC_FEATURE - Cytoplasmic localization signal
  REGION 65..100: note = MISC_FEATURE - Nucleic acid editing domain
  REGION 257..291: note = MISC_FEATURE - Nucleic acid editing domain
MKPHFRNTVERMYRDTFSYNFYNRPILSRRNTVWLCYEVKTKGPSRPPLDAKIFRGQVYSELKYHPEMRFFHWFSKWRKLHRDQEYEVTWYISWSPCTKCTRDMATFLAEDPKVTLTIFVARLYYFWDPDYQEALRSLCQKRDGPRATMKIMNYDEFQHCWSKFVYSQRELFEPWNNLPKYYILLHIMLGEILRHSMDPPTFTFNFNNEPWVRGRHETYLCYEVERMHNDTWVLLNQRRGFLCNQAPHKHGFLEGRHAELCFLDVIPFWKLDLDQDYRVTCFTSWSPCFSCAQEMAKFISKNKHVSLCIFTARIYDDQGRCQEGLRTLAEAGAKISIMTYSEFKHCWDTFVDHQGCPFQPWDGLDEHSQDLSGRLRAILQNQEN

SEQ ID NO: 37 - protein, 382 aa, Homo sapiens
  REGION 1..382: note = MISC_FEATURE - Human APOBEC-3B polypeptide sequence
  REGION 66..100: note = MISC_FEATURE - Nucleic acid editing domain
  REGION 251..289: note = MISC_FEATURE - Nucleic acid editing domain
MNPQIRNPMERMYRDTFYDNFENEPILYGRSYTWLCYEVKIKRGRSNLLWDTGVFRGQVYFKPQYHAEMCFLSWFCGNQLPAYKCFQITWFVSWTPCPDCVAKLAEFLSEHPNVTLTISAARLYYYWERDYRRALCRLSQAGARVTIMDYEEFAYCWENFVYNEGQQFMPWYKFDENYAFLHRTLKEILRYLMDPDTFTFNFNNDPLVLRRRQTYLCYEVERLDNGTWVLMDQHMGFLCNEAKNLLCGFYGRHAELRFLDLVPSLQLDPAQIYRVTWFISWSPCFSWGCAGEVRAFLQENTHVRLRIFAARIYDYDPLYKEALQMLRDAGAQVSIMTYDEFEYCWDTFVYRQGCPFQPWDGLEEHSQALSGRLRAILQNQGN

SEQ ID NO: 38 - protein, 395 aa, Rattus sp.
  REGION 1..395: note = MISC_FEATURE - Rat APOBEC-3B polypeptide sequence
MQPQGLGPNAGMGPVCLGCSHRRPYSPIRNPLKKLYQQTFYFHFKNVRYAWGRKNNFLCYEVNGMDCALPVPLRQGVFRKQGHIHAELCFIYWFHDKVLRVLSPMEEFKVTWYMSWSPCSKCAEQVARFLAAHRNLSLAIFSSRLYYYLRNPNYQQKLCRLIQEGVHVAAMDLPEFKKCWNKFVDNDGQPFRPWMRLRINFSFYDCKLQEIFSRMNLLREDVFYLQFNNSHRVKPVQNRYYRRKSYLCYQLERANGQEPLKGYLLYKKGEQHVEILFLEKMRSMELSQVRITCYLTWSPCPNCARQLAAFKKDHPDLILRIYTSRLYFWRKKFQKGLCTLWRSGIHVDVMDLPQFADCWTNFVNPQRPFRPWNELEKNSWRIQRRLRRIKESWGL

SEQ ID NO: 39 - protein, 226 aa, Bos taurus
  REGION 1..226: note = MISC_FEATURE - Bovine APOBEC-3B polypeptide sequence
DGWEVAFRSGTVLKAGVLGVSMTEGWAGSGHPGQGACVWTPGTRNTMNLLREVLFKQQFGNQPRVPAPYYRRKTYLCYQLKQRNDLTLDRGCFRNKKQRHAERFIDKINSLDLNPSQSYKIICYITWSPCPNCANELVNFITRNNHLKLEIFASRLYFHWIKSFKMGLQDLQNAGISVAVMTHTEFEDCWEQFVDNQSRPFQPWDKLEQYSASIRRRLQRILTAPI

SEQ ID NO: 40 - protein, 490 aa, Pan troglodytes
  REGION 1..490: note = MISC_FEATURE - Chimpanzee APOBEC-3B polypeptide sequence
MNPQIRNPMEWMYQRTFYYNFENEPILYGRSYTWLCYEVKIRRGHSNLLWDTGVFRGQMYSQPEHHAEMCFLSWFCGNQLSAYKCFQITWFVSWTPCPDCVAKLAKFLAEHPNVTLTISAARLYYYWERDYRRALCRLSQAGARVKIMDDEEFAYCWENFVYNEGQPFMPWYKFDDNYAFLHRTLKEIIRHLMDPDTFTFNFNNDPLVLRRHQTYLCYEVERLDNGTWVLMDQHMGFLCNEAKNLLCGFYGRHAELRFLDLVPSLQLDPAQIYRVTWFISWSPCFSWGCAGQVRAFLQENTHVRLRIFAARIYDYDPLYKEALQMLRDAGAQVSIMTYDEFEYCWDTFVYRQGCPFQPWDGLEEHSQALSGRLRAILQVRASSLCMVPHRPPPPPQSPGPCLPLCSEPPLGSLLPTGRPAPSLPFLLTASFSFPPPASLPPLPSLSLSPGHLPVPSFHSLTSCSIQPPCSSRIRETEGWASVSKEGRDLG

SEQ ID NO: 41 - protein, 190 aa, Homo sapiens
  REGION 1..190: note = MISC_FEATURE - Human APOBEC-3C polypeptide sequence
  REGION 65..100: note = MISC_FEATURE - Nucleic acid editing domain
MNPQIRNPMKAMYPGTFYFQFKNLWEANDRNETWLCFTVEGIKRRSVVSWKTGVFRNQVDSETHCHAERCFLSWFCDDILSPNTKYQVTWYTSWSPCPDCAGEVAEFLARHSNVNLTIFTARLYYFQYPCYQEGLRSLSQEGVAVEIMDYEDFKYCWENFVYNDNEPFKPWKGLKTNFRLLKRRLRESLQ

SEQ ID NO: 42 - protein, 190 aa, Gorilla sp.
  REGION 1..190: note = MISC_FEATURE - Gorilla APOBEC-3C polypeptide sequence
  REGION 65..100: note = MISC_FEATURE - Nucleic acid editing domain
MNPQIRNPMKAMYPGTFYFQFKNLWEANDRNETWLCFTVEGIKRRSVVSWKTGVFRNQVDSETHCHAERCFLSWECDDILSPNTNYQVTWYTSWSPCPECAGEVAEFLARHSNVNLTIFTARLYYFQDTDYQEGLRSLSQEGVAVKIMDYKDFKYCWENFVYNDDEPFKPWKGLKYNFRFLKRRLQEILE

SEQ ID NO: 43 - protein, 202 aa, Macaca mulatta
  REGION 1..202: note = MISC_FEATURE - Rhesus macaque APOBEC-3A polypeptide sequence
  REGION 72..103: note = MISC_FEATURE - Nucleic acid editing domain
MDGSPASRPRHLMDPNTFTFNFNNDLSVRGRHQTYLCYEVERLDNGTWVPMDERRGFLCNKAKNVPCGDYGCHVELRFLCEVPSWQLDPAQTYRVTWFISWSPCFRRGCAGQVRVFLQENKHVRLRIFAARIYDYDPLYQEALRTLRDAGAQVSIMTYEEFKHCWDTFVDRQGRPFQPWDGLDEHSQALSGRLRAILQNQGN

SEQ ID NO: 44 - protein, 185 aa, Bos taurus
  REGION 1..185: note = MISC_FEATURE - Bovine APOBEC-3A polypeptide sequence
  REGION 56..86: note = MISC_FEATURE - Nucleic acid editing domain
MDEYTFTENFNNQGWPSKTYLCYEMERLDGDATIPLDEYKGFVRNKGLDQPEKPCHAELYFLGKIHSWNLDRNQHYRLTCFISWSPCYDCAQKLTTFLKENHHISLHILASRIYTHNRFGCHQSGLCELQAAGARITIMTFEDFKHCWETFVDHKGKPFQPWEGLNVKSQALCTELQAILKTQQN

SEQ ID NO: 45 - protein, 200 aa, Homo sapiens
  REGION 1..200: note = MISC_FEATURE - Human APOBEC-3H polypeptide sequence
  REGION 54..88: note = MISC_FEATURE - Nucleic acid editing domain
MALLTAETFRLQFNNKRRLRRPYYPRKALLCYQLTPQNGSTPTRGYFENKKKCHAEICFINEIKSMGLDETQCYQVTCYLTWSPCSSCAWELVDFIKAHDHLNLGIFASRLYYHWCKPQQKGLRLLCGSQVPVEVMGFPKFADCWENFVDHEKPLSFNPYKMLEELDKNSRAIKRRLERIKIPGVRAQGRYMDILCDAEV

SEQ ID NO: 46 - protein, 210 aa, Macaca mulatta
  REGION 1..210: note = MISC_FEATURE - Rhesus macaque APOBEC-3H polypeptide sequence
MALLTAKTFSLQFNNKRRVNKPYYPRKALLCYQLTPQNGSTPTRGHLKNKKKDHAEIRFINKIKSMGLDETQCYQVTCYLTWSPCPSCAGELVDFIKAHRHLNLRIFASRLYYHWRPNYQEGLLLLCGSQVPVEVMGLPEFTDCWENFVDHKEPPSFNPSEKLEELDKNSQAIKRRLERIKSRSVDVLENGLRSLQLGPVTPSSSIRNSR

SEQ ID NO: 47 - protein, 386 aa, Homo sapiens
  REGION 1..386: note = MISC_FEATURE - Human APOBEC-3D polypeptide sequence
  REGION 78..109: note = MISC_FEATURE - Nucleic acid editing domain
  REGION 262..296: note = MISC_FEATURE - Nucleic acid editing domain
MNPQIRNPMERMYRDTFYDNFENEPILYGRSYTWLCYEVKIKRGRSNLLWDTGVFRGPVLPKRQSNHRQEVYFRFENHAEMCFLSWFCGNRLPANRRFQITWFVSWNPCLPCVVKVTKFLAEHPNVTLTISAARLYYYRDRDWRWVLLRLHKAGARVKIMDYEDFAYCWENFVCNEGQPFMPWYKFDDNYASLHRTLKEILRNPMEAMYPHIFYFHFKNLLKACGRNESWLCFTMEVTKHHSAVFRKRGVFRNQVDPETHCHAERCFLSWFCDDILSPNTNYEVTWYTSWSPCPECAGEVAEFLARHSNVNLTIFTARLCYFWDTDYQEGLCSLSQEGASVKIMGYKDFVSCWKNFVYSDDEPFKPWKGLQTNFRLLKRRLREILQ

SEQ ID NO: 48 - protein, 236 aa, Homo sapiens
  REGION 1..236: note = MISC_FEATURE - Human APOBEC-1 polypeptide sequence
MTSEKGPSTGDPTLRRRIEPWEFDVFYDPRELRKEACLLYEIKWGMSRKIWRSSGKNTTNHVEVNFIKKFTSERDFHPSMSCSITWFLSWSPCWECSQAIREFLSRHPGVTLVIYVARLFWHMDQQNRQGLRDLVNSGVTIQIMRASEYYHCWRNFVNYPPGDEAHWPQYPPLWMMLYALELHCIILSLPPCLKISRRWQNHLTFFRLHLQNCHYQTIPPHILLATGLIHPSVAWR

SEQ ID NO: 49 - protein, 229 aa, Mus musculus
  REGION 1..229: note = MISC_FEATURE - Mouse APOBEC-1 polypeptide sequence
MSSETGPVAVDPTLRRRIEPHEFEVFFDPRELRKETCLLYEINWGGRHSVWRHTSQNTSNHVEVNFLEKFTTERYFRPNTRCSITWFLSWSPCGECSRAITEFLSRHPYVTLFIYIARLYHHTDQRNRQGLRDLISSGVTIQIMTEQEYCYCWRNFVNYPPSNEAYWPRYPHLWVKLYVLELYCIILGLPPCLKILRRKQPQLTFFTITLQTCHYQRIPPHLLWATGLK

SEQ ID NO: 50 - protein, 224 aa, Homo sapiens
  REGION 1..224: note = MISC_FEATURE - Human APOBEC-2 polypeptide sequence
MAQKEEAAVATEAASQNGEDLENLDDPEKLKELIELPPFEIVTGERLPANFFKFQFRNVEYSSGRNKTFLCYVVEAQGKGGQVQASRGYLEDEHAAAHAEEAFFNTILPAFDPALRYNVTWYVSSSPCAACADRIIKTLSKTKNLRLLILVGRLFMWEEPEIQAALKKLKEAGCKLRIMKPQDFEYVWQNFVEQEEGESKAFQPWEDIQENFLYYEEKLADILK

SEQ ID NO: 51 - protein, 224 aa, Mus musculus
  REGION 1..224: note = MISC_FEATURE - Mouse APOBEC-2 polypeptide sequence
MAQKEEAAEAAAPASQNGDDLENLEDPEKLKELIDLPPFEIVTGVRLPVNFFKFQFRNVEYSSGRNKTFLCYVVEVQSKGGQAQATQGYLEDEHAGAHAEEAFFNTILPAFDPALKYNVTWYVSSSPCAACADRILKTLSKTKNLRLLILVSRLFMWEEPEVQAALKKLKEAGCKLRIMKPQDFEYIWQNFVEQEEGESKAFEPWEDIQENFLYYEEKLADILK

SEQ ID NO: 52 - protein, 224 aa, Rattus sp.
  REGION 1..224: note = MISC_FEATURE - Rat APOBEC-2 polypeptide sequence
MAQKEEAAEAAAPASQNGDDLENLEDPEKLKELIDLPPFEIVTGVRLPVNFFKFQFRNVEYSSGRNKTFLCYVVEAQSKGGQVQATQGYLEDEHAGAHAEEAFFNTILPAFDPALKYNVTWYVSSSPCAACADRILKTLSKTKNLRLLILVSRLFMWEEPEVQAALKKLKEAGCKLRIMKPQDFEYLWQNFVEQEEGESKAFEPWEDIQENFLYYEEKLADILK

SEQ ID NO: 53 - protein, 208 aa, Petromyzon marinus
  REGION 1..208: note = MISC_FEATURE - Petromyzon marinus CDA1 (pmCDAl) polypeptide sequence
MTDAEYVRIHEKLDIYTFKKQFFNNKKSVSHRCYVLFELKRRGERRACFWGYAVNKPQSGTERGIHAEIFSIRKVEEYLRDNPGQFTINWYSSWSPCADCAEKILEWYNQELRGNGHTLKIWACKLYYEKNARNQIGLWNLRDNGVGLNVMVSEHYQCCRKIFIQSSHNQLNENRWLEKTLKRAEKRRSELSFMIQVKILHTTKSPAV

SEQ ID NO: 54 - protein, 381 aa, Homo sapiens
  REGION 1..381: note = MISC_FEATURE - Human APOBEC3G D316R D317R polypeptide sequence
MKPHFRNTVERMYRDTFSYNFYNRPILSRRNTVWLCYEVKTKGPSRPPLDAKIFRGQVYSELKYHPEMRFFHWFSKWRKLHRDQEYEVTWYISWSPCTKCTRDMATFLAEDPKVTLTIFVARLYYFWDPDYQEALRSLCQKRDGPRATMKFNYDEFQHCWSKFVYSQRELFEPWNNLPKYYILLHFMLGEILRHSMDPPTFTFNFNNEPWVRGRHETYLCYEVERMHNDTWVLLNQRRGFLCNQAPHKHGFLEGRHAELCFLDVIPFWKLDLDQDYRVTCFTSWSPCFSCAQEMAKFISKKHVSLCIFTARIYRRQGRCQEGLRTLAEAGAKISFTYSEFKHCWDTFVDHQGCPFQPWDGLDEHSQDLSGRLRAILQNQEN

SEQ ID NO: 55 - protein, 182 aa, Homo sapiens
  REGION 1..182: note = MISC_FEATURE - Human APOBEC3G chain A polypeptide sequence
MDPPTFTFNFNNEPWWGRHETYLCYEVERMHNDTWVLLNQRRGFLCNQAPHKHGFLEGRHAELCFLDVIPFWKLDLDQDYRVTCFTSWSPCFSCAQEMAKFISKNKHVSLCIFTARIYDDQGRCQEGLRTLAEAGAKISFTYSEFKHCWDTFVDHQGCPFQPWDGLDEHSQDLSGRLRAILQ

SEQ ID NO: 56 - protein, 184 aa, Homo sapiens
  REGION 1..184: note = MISC_FEATURE - Human APOBEC3G chain A D120R D121R polypeptide sequence
MDPPTFTFNFNNEPWVRGRHETYLCYEVERMHNDTWVLLNQRRGFLCNQAPHKHGFLEGRHAELCFLDVIPFWKLDLDQDYRVTCFTSWSPCFSCAQEMAKFISKNKHVSLCIFTARIYRRQGRCQEGLRTLAEAGAKISFMTYSEFKHCWDTFVDHQGCPFQPWDGLDEHSQDLSGRLRAILQ

SEQ ID NO: 57 - protein, 367 aa, Homo sapiens
  REGION 1..367: note = MISC_FEATURE - hAPOBEC-4 polypeptide sequence
MEPIYEEYLANHGTIVKPYYWLSFSLDCSNCPYHIRTGEEARVSLTEFCQIFGFPYGTTFPQTKHLTFYELKTSSGSLVQKGHASSCTGNYIHPESMLFEMNGYLDSAIYNNDSIRHIILYSNNSPCNEANHCCISKMYNFLITYPGITLSIYFSQLYHTEMDFPASAWNREALRSLASLWPRVVLSPISGGIWHSVLHSFISGVSGSHVFQPILTGRALADRHNAYEINAITGVKPYFTDVLLQTKRNPNTKAQEALESYPLNNAFPGQFFQMPSGQLQPNLPPDLRAPVVFVLVPLRDLPPMHMGQNPNKPRNIVRHLNMPQMSFQETKDLGRLPTGRSVEIVEITEQFASSKEADEKKKKKGKK

SEQ ID NO: 58 - protein, 388 aa, Rattus norvegicus
  REGION 1..388: note = MISC_FEATURE - rAPOBEC-4 polypeptide sequence
MEPLYEEYLTHSGTIVKPYYWLSVSLNCTNCPYHIRTGEEARVPYTEFHQTFGFPWSTYPQTKHLTFYELRSSSGNLIQKGLASNCTGSHTHPESMLFERDGYLDSLIFHDSNIRHIILYSNNSPCDEANHCCISKMYNFLMNYPEVTLSVFFSQLYHTENQFPTSAWNREALRGLASLWPQVTLSAISGGIWQSILETFVSGISEGLTAVRPFTAGRTLTDRYNAYEINCITEVKPYFTDALHSWQKENQDQKVWAASENQPLHNTTPAQWQPDMSQDCRTPAVFMLVPYRDLPPIHVNPSPQKPRTVVRHLNTLQLSASKVKALRKSPSGRPVKKEEARKGSTRSQEANETNKSKWKKQTLFIKSNICHLLEREQKKIGILSSWSV

SEQ ID NO: 59 - protein, 363 aa, Macaca fascicularis
  REGION 1..363: note = MISC_FEATURE - mfAPOBEC-4 polypeptide sequence
MEPTYEEYLANHGTIVKPYYWLSFSLDCSNCPYHIRTGEEARVSLTEFCQIFGFPYGTTYPQTKHLTFYELKTSSGSLVQKGHASSCTGNYIHPESMLFEMNGYLDSAIYNNDSIRHIILYCNNSPCNEANHCCISKVYNFLITYPGITLSIYFSQLYHTEMDFPASAWNREALRSLASLWPRVVLSPISGGIWHSVLHSFVSGVSGSHVFQPILTGRALTDRYNAYEINAITGVKPFFTDVLLHTKRNPNTKAQMALESYPLNNAFPGQSFQMTSGIPPDLRAPVVFVLLPLRDLPPMHMGQDPNKPRNIIRHLNMPQMSFQETKDLERLPTRRSVETVEITERFASSKQAEEKTKKKKGKK

SEQ ID NO: 60 - protein, 218 aa, Rattus norvegicus
  REGION 1..218: note = MISC_FEATURE - rAPOBEC-1 (delta 177-186) polypeptide sequence
MSSETGPVAVDPTLRRRIEPHEFEVFFDPRELRKETCLLYEINWGGRHSIWRHTSQNTNKHVEVNFIEKFTTERYFCPNTRCSITWFLSWSPCGECSRAITEFLSRYPHVTLFIYIARLYHHADPRNRQGLRDLISSGVTIQIMTEQESGYCWRNFVNYSPSNEAHWPRYPHLWVRGLPPCLNILRRKQPQLTFFTIALQSCHYQRLPPHILWATGLK

SEQ ID NO: 61 - protein, 218 aa, Rattus norvegicus
  REGION 1..218: note = MISC_FEATURE - rAPOBEC-1 (delta 202-213) polypeptide sequence
MSSETGPVAVDPTLRRRIEPHEFEVFFDPRELRKETCLLYEINWGGRHSIWRHTSQNTNKHVEVNFIEKFTTERYFCPNTRCSITWFLSWSPCGECSRAITEFLSRYPHVTLFIYIARLYHHADPRNRQGLRDLISSGVTIQIMTEQESGYCWRNFVNYSPSNEAHWPRYPHLWVRLYVLELYCIILGLPPCLNILRRKQPQHYQRLPPHILWATGLK

SEQ ID NO: 62 - protein, 198 aa, Mus musculus
  REGION 1..198: note = MISC_FEATURE - mouse cytidine deaminase polypeptide sequence
  REGION 1..30: note = MISC_FEATURE - Nuclear localization sequence
  REGION 183..198: note = MISC_FEATURE - Nuclear export signal
MDSLLMKQKKFLYHFKNVRWAKGRHETYLCYVVKRRDSATSCSLDFGHLRNKSGCHVELLFLRYISDWDLDPGRCYRVTWFTSWSPCYDCARHVAEFLRWNPNLSLRIFTARLYFCEDRKAEPEGLRRLHRAGVQIGIMTFKDYFYCWNTFVENRERTFKAWEGLHENSVRLTRQLRRILLPLYEVDDLRDAFRMLGF

SEQ ID NO: 63 - protein, 224 aa, Petromyzon marinus
  REGION 1..224: note = MISC_FEATURE - pmCDA-1 polypeptide sequence
MAGYECVRVSEKLDFDTFEFQFENLHYATERHRTYVIFDVKPQSAGGRSRRLWGYIINNPNVCHAELILMSMIDRHLESNPGVYAMTWYMSWSPCANCSSKLNPWLKNLLEEQGHTLTMHFSRIYDRDREGDHRGLRGLKHVSNSFRMGVVGRAEVKECLAEYVEASRRTLTWLDTTESMAAKMRRKLFCILVRCAGMRESGIPLHLFTLQTPLLSGRVVWWRV

SEQ ID NO: 64 - protein, 331 aa, Petromyzon marinus
  REGION 1..331: note = MISC_FEATURE - pmCDA-2 polypeptide sequence
MELREVVDCALASCVRHEPLSRVAFLRCFAAPSQKPRGTVILFYVEGAGRGVTGGHAVNYNKQGTSIHAEVLLLSAVRAALLRRRRCEDGEEATRGCTLHCYSTYSPCRDCVEYIQEFGASTGVRVVIHCCRLYELDVNRRRSEAEGVLRSLSRLGRDFRLMGPRDAIALLLGGRLANTADGESGASGNAWVTETNVVEPLVDMTGFGDEDLHAQVQRNKQIREAYANYASAVSLMLGELHVDPDKFPFLAEFLAQTSVEPSGTPRETRGRPRGASSRGPEIGRQRPADFERALGAYGLFLHPRIVSREADREEIKRDLIVVMRKHNYQGP

SEQ ID NO: 65 - protein, 209 aa, Petromyzon marinus
  REGION 1..209: note = MISC_FEATURE - pmCDA-5 polypeptide sequence
MAGDENVRVSEKLDFDTFEFQFENLHYATERHRTYVIFDVKPQSAGGRSRRLWGYIINNPNVCHAELILMSMIDRHLESNPGVYAMTWYMSWSPCANCSSKLNPWLKNLLEEQGHTLMMHFSRIYDRDREGDHRGLRGLKHVSNSFRMGVVGRAEVKECLAEYVEASRRTLTWLDTTESMAAKMRRKLFCILVRCAGMRESGMPLHLFT

SEQ ID NO: 66 - protein, 158 aa, Saccharomyces cerevisiae
  REGION 1..158: note = MISC_FEATURE - yCD polypeptide sequence
MVTGGMASKWDQKGMDIAYEEAALGYKEGGVPIGGCLINNKDGSVLGRGHNMRFQKGSATLHGEISTLENCGRLEGKVYKDTTLYTTLSPCDMCTGAIIMYGIPRCVVGENVNFKSKGEKYLQTRGHEVVVVDDERCKKIMKQFIDERPQDWFEDIGE

SEQ ID NO: 67 - protein, 194 aa, synthetic construct
  REGION 1..194: note = cytidine deaminase polypeptide sequence
MKPQIRDHRPNPMEAMYPHIFYFHFENLEKAYGRNETWLCFTVEIIKQYLPVPWKKGVFRNQVDPETHCHAEKCFLSWFCNNTLSPKKNYQVTWYTSWSPCPECAGEVAEFLAEHSNVKLTIYTARLYYFWDTDYQEGLRSLSEEGASVEIMDYEDFQYCWENFVYDDGEPFKRWKGLKYNFQSLTRRLREILQ

SEQ ID NO: 68 - protein, 192 aa, synthetic construct
  REGION 1..192: note = cytidine deaminase polypeptide sequence
MADSSEKMRGQYISRDTFEKNYKPIDGTKEAHLLCEIKWGKYGKPWLHWCQNQRMNIHAEDYFMNNIFKAKKHPVHCYVTWYLSWSPCADCASKIVKFLEERPYLKLTIYVAQLYYHTEEENRKGLRLLRSKKVIIRVMDISDYNYCWKVFVSNQNGNEDYWPLQFDPWVKENYSRLLDIFWESKCRSPNPW

SEQ ID NO: 69 - protein, 280 aa, synthetic construct
  REGION 1..280: note = cytidine deaminase polypeptide sequence
MDPQRLRQWPGPGPASRGGYGQRPRIRNPEEWFHELSPRTFSFHFRNLRFASGRNRSYICCQVEGKNCFFQGIFQNQVPPDPPCHAELCFLSWFQSWGLSPDEHYYVTWFISWSPCCECAAKVAQFLEENRNVSLSLSAARLYYFWKSESREGLRRLSDLGAQVGIMSFQDFQHCWNNFVHNLGMPFQPWKKLHKNYQRLVTELKQILREEPATYGSPQAQGKVRIGSTAAGLRHSHSHTRSEAHLRPNHSSRQHRILNPPREARARTCVLVDASWICYR

SEQ ID NO: 70 - protein, 555 aa, synthetic construct
  REGION 1..555: note = pYY-BEM3.1; tr|F7B644|F7B644_HORSE polypeptide sequence
MPRGRARERQRRNPMEKLDAEAFSFHFLNMEFVYDRNCSYLCYQVEGRLSGSPVLSEQGVFPNEVCGKTRRHAELCFLDWFRGRLSPDEYYCVTWFISWSPCSNCAREVAEFLKRHRNVELSIFAARLYYCRDHEQGLQSLCNRGAQLAVMLRKDFTYCWDNFVHNSGREFSPWENIDANSDLLARKLEDLLKNPMEKLHRKTFSFHFRNLKFAKGRKCSYLCYRVEGRLSGSPGLSEQGVFLNEVCDENCRHAELCFLHWFRGRLSPHADYRVTWFISWSPCSNCAREVAEFLKQHRNVELHISAARLYYWQRNKPGLRNLRSSGAQLAIMFFWDFRDCWDNFVHNSGRHFIPWKKINVNSRLLATKLEDLLKNPLEKLHPNTFSFHFCNLEFAYDRKYSYLCYQVEGRLSGSPGLSEQGVFLNEVCGKTRCHAELCFLDWFRVRLSPDEYYRVTWFISWSPCFYCAREVADFLKQYRNVKLSIFAARLYYCRDHAQGLRSLCSSGAQLAIMFFWDFRYCWDNFVHNSGREFRPWKKINVNSRLLATKLEDILK

SEQ ID NO: 71 - protein, 437 aa, synthetic construct
  REGION 1..437: note = pYY-BEM3.2; tr|D1LZA1|D1LZA1_PANTI polypeptide sequence
MEPWRPSPRNPMDRIDPKTFRFQFPNLRYASGRKLCYLCFQVERDYFYYNDSDWGVFRNEVHPWAPCHAEQCFLSWFRDQYPYRDEDYNVTWFLSWSPCPTCAEEVVEFLEEYRNLTLSIFTSRLYYFWHPNYQEGLCKLWDAGVQLDIMSCDEFEYCWDNFVYHKGMRFQRRNLLKDYDFLAAKLQEILSPGQQRKRDWPFPPRPGAQVDPRSWVQEVTEPGINTRRHPLHLLVSFLLPRPTMNPLQEDIFYRQFGNQHRVPKPYYYRRKTYLCYQLKLPEGTLIDKDCLRNKKKRHAEICFIDKIKSLTRDTSQRFEIICYITWSPCPFCAEELVAFVKDNPHLSLRIFASRLYVHWRWKYQQGLRHLHASGIPVAVMSLPEFEDCWRNFVDHQDRLFQPWRNLDQYSESIKRRLGKILTPLNDLRNDFRNLKLE

SEQ ID NO: 72 - protein, 440 aa, synthetic construct
  REGION 1..440: note = pYY-BEM3.3; tr|A0A3Q0DM17|A0A3Q0DM17_TARSY polypeptide sequence
MPMKRMYSNIYFDHFNNQRLLSGQNAPWLCFKVERVENCMLVPLETGVFGNQVSGCCGKTERPVEPTSLTRSVLVSPNPGTELRAQQPSRKGHLGKLGCVEYPSPGLALVMLGYGASTYCPDSSMYCPETCHHPEMCFLYWFEKTLSHEEQYQITWYVSWSPCVNCAEEVAEFLSVHPKVNLTIYAARLYCYQKLNHRQGLRRLCKEGACVKIMNYEEFDHCWENFVYNNYKSFKPWVKLQDNYELLATELDKILRIPMERMPQKKFRFHFQNLIAKDRNTTWLCFEVKNVRKKHPPDLLERGIFQNQVTPRINCHAEMCFLSWFLENMLLHGKRYQVTWYISWSPCSICAEEVAEFLSAHPKVSLTIYAARLYYFWVPGYRQGLRRLVEEGARVEIMNYEEFDYCWENFVSINNEPFQPWEGLHEKYGYLVTKLNNILG

SEQ ID NO: 73 - protein, 453 aa, synthetic construct
  REGION 1..453: note = pYY-BEM3.4; tr|A0A3Q0DNJ5|A0A3Q0DNJ5_TARSY polypeptide sequence
MEDNPEPRPRQQMDQDTFIFNFNNDPSVRGRHQTFLCYEVEHLDDDTWVPQDKYLGFLHNQPQSRSNAYCAYHAELCFLELVSSWQLDPAQRYRVTCFISWSPCSSCAQEVAAFLKKNRHVTLRILAARIYDYYQGYEDGLRTLQGVGVDITVMTSAEFGHCWNTFVDHQGSPFQPWEGLDQHSQVIWQRMQDILQVIPAKYLMEKVKYTVTVDILFKGRVPGPRYLMDQNTFTRNFINNLSVSGRRQTLLCYEVERLGGDIWVPLDQLRGFLLSQARDVLNYYQGRHAEPCFLDLVSSWQLDPAQHYRVTWFISWSPCTSCAQAVAAFLRENRHVTLRILAARIYDYHQGYEEGLRTLQRTGAHIDIMTFKEFGHCWNTFVNHKGSPFKSWTGLDQHSQALRKRLQDILHTMASSLWDQSEPKKPIPSQEVTLPESIPPSHGNRFRLVKRPS

SEQ ID NO: 74 - protein, 424 aa, synthetic construct
  REGION 1..424: note = pYY-BEM3.5; tr|G5AYU5|G5AYU5_HETGA polypeptide sequence
FCFLSCVHRKPIERIYKKAFRFYFRNLRCAYGRNKTFLCYEVKRERDNKVLHKGVVLNQVEPYMPLHAELRFLSWFHDTLLCPLGSYQVTLYVSWSPCSECAEELTTFLAGHRNVTMTIYVAQLYYCNWKSPNREGLKILIAEDARLRVMFYDEFLYCWRNFVKNDYNNFDPWSLLDENSRYHNRILQNILKGWGRPHRVGPEGEQTATPGGSGGHCISVFSLLRRREMTLKEETFRVQFNNAYKAPKPYRRRVTYLCYQLQEANGDPLTKGCLRTKKGYHAESRFIKRICSMDLGQDQSYQVTCFLTWSPCPHCAQELVSFKRAHPHLRLQIFTARLFFHWKRSYQEGLQRLCRAQVPVAVMGHPEFAYCWDNFVDHQPGPFEPPWAKLEYYSSCLKRRLQQILRSWGVDDLTNDFRNLQLGP

SEQ ID NO: 75 - protein, 385 aa, synthetic construct
  REGION 1..385: note = pYY-BEM3.6; tr|A0A2Y9QMV5|A0A2Y9QMV5_TRIMA polypeptide sequence
MLSSPQTPGTRKPMKTLAPDEFSFNFENLRLAHGRNTTFLCFQVETKAPPSLNSPDSGIFQNQDHCPSHHHAEMVFLTWFQKRLSPAQHYEVTWYMSWSPCSRCAVQVAKFLKSNSTVNLSIFVARLYYPRELETKDGLHSLWQAGAQVQIMFFQDFKYCWENFVNNEGKPFQPWKNLDENSKDWDTELKDIHRNTTDLLTEEMFYSQFYNREKKSSIPRKTYLCYQLNEPQPVKRCLHYKKGYHAVTRFIDGIVSMNLDPARSYDITCYFTWSPCNRYARKLVSFIEDYPNLRLKVYTSRLYFHWCWTNMQGLQHLQNSRVTVAVMTFRDFEYCWKNFVDNQGKPFEPWEKLDLYSQSTERRLRRILKPLTPDVLNEDFGNLHL

SEQ ID NO: 76 - protein, 381 aa, synthetic construct
  REGION 1..381: note = pYY-BEM3.7; tr|H0XHI0|H0XHI0_OTOGA polypeptide sequence
LSCAFRDPMNRMYPKTFCQNFEKEPCPSNQNSSWLCFEVETKNSAVFFHRGVFRNQPAPPPRAPTSVLLSQGPVKTPCHAEECFLTWIQGVLPPDHHYHVTWYVSRGPCANCANLIVHFLAMHRRVTLTIFAAHLNFFWESDFQQGLLRMDQEGVQLHIMGYEEFEYCWDNFVYNQRKQFVPWNGLNENYEFMVSTLEDILRSPLDRIRQKDFSIHFRNSLWLDDKSTWLCFEVKRTKSPVPLYRGVFRNQSPPKTPCHAEVRFFTWLQDLPPDFCCQFTWYLSWSPCADCADLVANFLAKHRNVSLTIFVARLYYYRDPEMHRGLRRMYQEGANVDIMSVIEFEYCWDNFVYNQGKQFVPWNGLNENYEFLVPRLQEILE

SEQ ID NO: 77 - protein, 337 aa, synthetic construct
  REGION 1..337: note = pYY-BEM3.8; tr|A0A3M0K4Y7|A0A3M0K4Y7_HIRRU polypeptide sequence
MYISKKALRRHFDPRVYPRETYLLCELQWEGSRRVWIHWIRNVPDHHAEEYFLEEVFEPRNYGFCNITLYLSWSPCCTCCSKIRDFLKRNPNVKIDIRVARLIYPDYAETRSSLRELNGLQRVSIQVMEAAGLSCIESKNHRISQVERDPKGSSSPTLFTLQDHLKLSNMTESVIQDSVSIQICYQMRILGFQCHIRWKLQPEDFQRNYSPNQIGRVVYLLYEVRWRRGSIWRNWCSNNPEQHAEVNFLENHFHHRPQTPCSITWFLSTSPCGKCSRRILEFLKSQPNVTLEIYAAKLFRHHDIRNRQGLRNLMMNGVTIYIMNLEGNPASLCLSVD

SEQ ID NO: 78 - protein, 237 aa, synthetic construct
  REGION 1..237: note = pYY-BEM3.9; tr|A0A3P4LUZ8|A0A3P4LUZ8_GULGU polypeptide sequence
MSFEDYEYCWETFVDHKGMYFQSWDLLRDNDLLAAELKNILRSTMNPLRQEIFYHQFGNQPRAPRPYHRRKTYLCYQLQPHEGPITARVCLQNKKKRHAEIRFIDNIRALRLDRSQTFEITCYLTWSPCPTCAKALAVFVQDHPHISLRLFASRLFIHWCWKYQEGLRLLHRSRIPVAVMRLQEFEDCWRNFVDNQDEPFQPWNKLEQYSESITRRLRRILGHPQNNLENDFRNLHI

SEQ ID NO: 79 - protein, 221 aa, synthetic construct
  REGION 1..221: note = pYY-BEM3.10; tr|G5BPM8|G5BPM8_HETGA polypeptide sequence
RRRIEPWQFEASFDPRQLRRETCLLSEVRWGTSPRAWRGCSLNTARHAEVSFMDRLTSEGRLRGPVRCSITWFLSWSPCGACAQAIGEFLRQHPNVSLVIYIARLFWHVDEQNRQGLRDLVTRGVRMQVMSDPEFAHCWRNFVNYSPGQEARWPQVPPVWTWLYSLELHCILLNLPPCLKISRRHHNQLTFFQLILQNCHYQAIPSPVLLASGLIHPFVTW

SEQ ID NO: 80 - protein, 211 aa, synthetic construct
  REGION 1..211: note = pYY-BEM3.11; tr|H2M862|H2M862_ORYLA polypeptide sequence
MITKLDSVLLPKKKFIYHYKNMRWARGRHETYLCFVVKRRVGPESLSFDFGHLRNRNGCHVELLFLRHLSALCPGLWGYGATGQGRVSYSITWFCSWSPCANCSFRLAQFLSQTPNLRLRIFVSRLYFCDLEDSREREGLRMLKKVGVHITVMSYKDYFYCWQTFVARKQSKFKPWDGLHQNSVRLSRKLNRILQPCETEDFRDAFKLLGL

SEQ ID NO: 81 - protein, 353 aa, synthetic construct
  REGION 1..353: note = pYY-BEM3.12; tr|H0Y0C6|H0Y0C6_OTOGA polypeptide sequence
MYLKTFYRHFNNRPYLSRRNDTWLCFEVKTTSSNSPGSFYSGVFRNQGPRYCPWHTELCFLTWVRPIVSHHHFYQITWYMSWSPCANCAWQVATFLATHENVSLTNYTVRIYYFWRQDYRQGLLRMIEEGTQVYVMSSKEFQHCWENFVDHWGTRWVTCWNRLKKNYEFLVTRLSEILSDPKERISPNTFYNQFNNTPVPRGRKDTWLCFEVKEKNSNSPGSFHRGVFQNQVFSGTSSHARRCPPDHHYEVTWYTSWSPCAHCAWHVVNFLTSNPNVSLTIFAARLYYIYRPEIQQGLRRVFQEGAKVHIMSLKEFKYCWAKLVYNSGMRFMPWYQFNFNFLFPNTTLKGDLH

SEQ ID NO: 82 - protein, 189 aa, synthetic construct
  REGION 1..189: note = pYY-BEM3.13; tr|A0A3Q2Z5X6|A0A3Q2Z5X6_HIPCM polypeptide sequence
MDVHFMNFIYHYKNMRWAKGRNETYLCFVVKRRVGPNSLTFDFGHLRNRNGCHVELLFLRYLGRRLSYSITWFCSWSPCANCSAALSQFLSRMPNLRLRIFVARLYFCDMEDSHEREGLRLLQKAGVQVTVMSYKDYYYCWQTFVDRKKSHFKAWEDLHQNSVRLSRKLNRILQPCEMDLRDAFKLLGL

SEQ ID NO: 83 - protein, 190 aa, synthetic construct
  REGION 1..190: note = pYY-BEM3.15; tr|A0A2K6NY90|A0A2K6NY90_RHIRO polypeptide sequence
MNPHIRNPMEAMYPGTFYFHFKNLWEADNRNESWLCFAVEVIKHHSTVSWKRGVFRNQVDPETHCHAEKCFLSWFCDNTLSPKKNYQVTWYTSWSPCPECAREVAKFLARHSNVMLTIYTARLYYSQYPNYQEGLRRLNEEGVPVEIMDYEDFKYCWENFVYNGDELFKPWKGLKYNFLFLDSKLQEILE

SEQ ID NO: 84 - protein, 202 aa, synthetic construct
  REGION 1..202: note = pYY-BEM3.16; tr|Q6ICH2|Q6ICH2_HUMAN polypeptide sequence
MNPQIRNPMERMYRDTFYDNFENEPILYGRSYTWLCYEVKIKRGRSNLLWDTGVFRGPVLPKRQSNHRQEVDPETHCHAERCFLSWFCDDILSPNTNYEVTWYTSWSPCPECAGEVAEFLARHSNVNLTIFTARLCYFWDTDYQEGLCSLSQEGASVKIMGYKDFVSCWKNFVYSDDEPFKPWKGLQTNFRLLKRRLREILQ

SEQ ID NO: 85 - protein, 202 aa, synthetic construct
  REGION 1..202: note = pYY-BEM3.17; tr|G8GPV1|G8GPV1_CERNE polypeptide sequence
MDGSPASRPGHVMDPGTFTSNFNNKPWVSGQRETYLCYKVERSHNDTWVLLNQHRGFLRNQAKNRLHGDYGCHAELCFLGEVPSWRLDPTQTYRVTWFISWSPCFSGGCAEQVRAFLQENTHVRLRIFAARIYDYDFLYQEALRTLRDAGAQVSIMTYEEFKHCWDTFVDHQGRPFQPWDGLDEHSQALSGRLQAILQNQGN

SEQ ID NO: 86 - protein, 181 aa, synthetic construct
  REGION 1..181: note = pYY-BEM3.18; tr|Q1WBT6|Q1WBT6_SYMSY polypeptide sequence
MALLTAKTFRLQFNNKRRVTKPYYPRKALLCYQLTPQNGSTPTRGYFKNKKKRHAEIRFINKIKSMGLDETQCYQVTCYLTWSPCPSCAWELVDFIKAHDHLNLGIFASRLYYHWCRHQQEGLRLLCGSQVPVEVMGFPEFADCWENFVDHEEPLSFNPSEMLEELDKNSRAIKRRLEKIK

SEQ ID NO: 87 - protein, 211 aa, synthetic construct
  REGION 1..211: note = pYY-BEM3.19; tr|A0A3B4CS14|A0A3B4CS14_PYGNA polypeptide sequence
MDNTNRRKFIYHYKNVRWARGRHETYLCFVVKKRNSPDSLSFDFGHLRNRNGCHVELLFLRYIEVLCPGLWGSGVDGVRVSYAVTWFCSWSPCSNCAQRLTNFLSQTPNLRLRIFVARLYFCDEEDSLEREGLRHLQRAGVQITVMTYKDFFYCWQTFVASRERCFKAWEGLRQNSVRLSRKLNRILQVFISTPVISPLITTHLGQSWAGG

SEQ ID NO: 88 - protein, 315 aa, synthetic construct
  REGION 1..315: note = pYY-BEM3.20; tr|A0A087XZI4|A0A087XZI4_POEFO polypeptide sequence
RKVSYSVTWFCSWSPCANCSIRLAQFLHQTPNLRLRIFVSRLYFCDLEDSREREGLRILKKAGVHITVMSYKDYFYCWQTFVAKSQSKFKPWDGLHQNYIRLSRKLNRILQPALDIKKFIYHYKNLRWARGRCETYLCFVVKKKLHLFMFVIVGRNRLFDLNVTMNNKSLYLIPLHLQLLFLRHLGALCPGLWGYGVTGERKVSYSVTWFCSWSPCANCSIRLAQFLHQTPNLRLRIFVSRLYFCDLEDSREREGLRILKKAGVHITVMSYKDYFYCWQTFVAKSQSKFKPWDGLHQNYIRLSRKLNRILQVQFF

SEQ ID NO: 89 - protein, 189 aa, synthetic construct
  REGION 1..189: note = pYY-BEM3.21; tr|A0A341AEK4|A0A341AEK4_9CETA polypeptide sequence
MASDRGPSAGDATSRRRIEPWEFEVSFDPRELCKETRLLYEIKWGRSQHVWRHSGKNTTNHVECNFIEKFTSERPFHRSVSCCITWFLSWSPCWECSKAIREFLNQHPRVTLFIYVARLFQHMDPQNRQGLRDLIHSGVTIQIMGPTEYDYCWRNFVNYPPGKEAHWPRYPPPLMKLYALELHCIILVP

SEQ ID NO: 90 - protein, 180 aa, synthetic construct
  REGION 1..180: note = pYY-BEM3.22; tr|E2D879|E2D879_MUSMI polypeptide sequence
RNLISRETFNFNFENLCYAKGRKNTFLCYEVTRKDCDSPVSLCHGVFKNKGSIHAEICFLYWFHDKVLKVLTPREEFKVTWYMSWSPCFECAEQVVRFLATHHNLNLTIFSSRLYNVSDPDTQQKLCRLVQEGAQVAVMDLSEFKKCWEKFVDNDGQQFRPWKRLRTNFRYQNSKLQEIL

SEQ ID NO: 91 - protein, 221 aa, synthetic construct
  REGION 1..221: note = pYY-BEM3.23; tr|A0A2K5RDN6|A0A2K5RDN6_CEBCA polypeptide sequence
MWEAQSPGLSREWGSVAISPEDPGPLHIGRFLSCAFRHPMNAMYPGIFNFHFRNLRKAYGRNETWLCFTVEGIMNRSTVSWKSGVFRNQVGSDPFCHAEMCFLSWFRHNMLSPKKDYEVTWYASWSPCPECAGQVAEFLARHGNVRLTIFTAHLYYFWNPSFRQGLRRLSQEGASVLIMGYEDFEYCWDNFVYNDGQPFKPWKRLQDNSLSLYITLQEILQ

SEQ ID NO: 92 - protein, 206 aa, synthetic construct
  REGION 1..206: note = pYY-BEM3.24; tr|A0A2K5RDN7|A0A2K5RDN7_CEBCA polypeptide sequence
MEASPASRPRPLMGPRTFTENFTNNPEVFGRHQTYLCYEVKCQGPDGTRDLMTEQRDFLCNQARNLLSGFDGRHAERCFLDRVPSWRLDPAQTYRVTCFISWSPCFSCAREVAEFLQENPHVNLRIFAARIYDCRPRYEEGLQMLQNAGAQVSIMTSEEFRHCWDTFVDHQGHPFQPWEGLDEHSQALSRRLQAILQGNRWMILSL

SEQ ID NO: 93 - protein, 184 aa, synthetic construct
  REGION 1..184: note = pYY-BEM3.25; tr|A0A1C9CJ69|A0A1C9CJ69_CERAL polypeptide sequence
NPMKAMDPHIFYFHFKNLRKAYGRNETWLCFAVEIIKQRSTVPWRTGVFRNQVDPESHCHAERCFLSWFCEDILSPNTDYRVTWYTSWSPCLDCAGEVAEFLARHSNVELAIFAARLYYFWDTHYQQGLRSLSEKGASVEIMGYEDFKYCRENFVCDDGKPFKPWKGLKTNFRFLKRRLQEILE

SEQ ID NO: 94 - protein, 197 aa, synthetic construct
  REGION 1..197: note = pYY-BEM3.26; tr|A0A2R2Z4D2|A0A2R2Z4D2_PTEAL polypeptide sequence
MHLQVWRKVTEAWREGYTLKPWSRNPMERLYHDYFYFHFYNLPTPKHRNGCYICYQVEGTKKHSRMPLLRGVFENQESLDMMLSPGEKYRVTWYISWSPCFACVDEVIKFLREHTNVELIIFAARLYHSDILQYRQGLRKLHDAGVHVAIMSYYEFKHCLNDFVFHQGRSFCPWNDLNKNSKNLSNTLEDILRNQED

SEQ ID NO: 95 - protein, 206 aa, synthetic construct
  REGION 1..206: note = pYY-BEM3.27; tr|B7T161|B7T161_SHEEP polypeptide sequence
MTEGWAGSGLPGRGDCVWTPQTRNTMNLLRETLFKQQFGNQPRVPPPYYRRKTYLCYQLKELDDLMLDKGCFRNKKQRHAEIRFIDKINSLNLNPSQSYKIICYITWSPCPNCASELVDFITRNDHLNLQIFASRLYFHWIKPFCRGLHQLQKAGISVAVMTHTEFEDCWEQFVDNQLRPFQPWDKLEQYSASIRRRLQRILTAPT

SEQ ID NO: 96 - protein, 205 aa, synthetic construct
  REGION 1..205: note = pYY-BEM3.28; tr|A0A2R2X2G4|A0A2R2X2G4_PTEAL polypeptide sequence
MAGLGQACEGCCGQMPEISYPMGRLDPKTFSFEFKNLPYAYGRKSSYLCFQVEREQHSSPVPSDWGVFKNQFCGTEPYHAELCFLNWFRAEKLSPYEHYDVTWFLSWSPCSTCAEEIAIFLSNHKNVRLNIFVSRIYYFWKPAFRQGLQELDHLGVQLDAMSFDEFKYCWENFVDNQGMPFRCWKKVHQNYKSVLRKLNEILRRR

SEQ ID NO: 97 - protein, 309 aa, synthetic construct
  REGION 1..309: note = pYY-BEM3.29; tr|G1Q1M4|G1Q1M4_MYOLU polypeptide sequence
YAELSFLDLFQSWNLDRGRQYRLTWYMSWSPYPDCAQKLVEFLGENSHVTLRIFAADIHSLCSGYEDGLRKLRDARAQLAIMTRDELQYCWVTFVDNQGQPFRPWPNLVEHIKTKKQELKDILGNPMRRMYPKTFNFNFQNLNSYGRKSTFLCFEVETWEDGSVLDYQNGVFQNQLDPGHAELCFIEWFHEKVLFPDEVRCPDAQYHVTWYISWSPCFECAEQVAGFLNEHENVDLSISAARLYLCEDEDEQGLQDLVAAGAKVAMMAPEDFEYCWDNFVYNRGWPFTYWKHVRRNYGRLQEKLDEILW

SEQ ID NO: 98 - protein, 216 aa, synthetic construct
  REGION 1..216: note = pYY-BEM3.30; tr|A0A1S3AN78|A0A1S3AN78_ERIEU polypeptide sequence
RRIEPWEFEDFFDPRQFRPETCLLYEVRWGSSRNAWRSTARNTTRHAEVNFLERFAAERHFDKPVSCSITWFLSWSPCWECSQAIGAFLSQHPQVTLAIHVTRLFHHEDEQNRQGLRDLLARGVTLQVMGDSEYAHCWRTFVNSPPGAEGHYPRYPSDFTRLYALELHCIILGLPPCLEILRRYQNQFTLFRLVPQNCHYQMIPHLNFFVVRHYFF

SEQ ID NO: 99 - protein, 201 aa, synthetic construct
  REGION 1..201: note = pYY-BEM3.32; tr|Q4VUI3|Q4VUI3_XENLA polypeptide sequence
MTMDSMLLKRNKFIYHYKNLRWARGRHETYLCYIVKRRYSSVSCALDFGYLRNRNGCHAEMLFLRYLSIWVGHDPHRNYRVTWFSSWSPCYDCAKRTLEFLKGHPNFSLRIFSARLYFCEERNAEPEGLRKLQKAGVRLSVMSYKDYFYCWNTFVETRESGFEAWDGLHENSVRLARKLRRILQPPYDMEDLREVFVLLGL

SEQ ID NO: 100 - protein, 191 aa, synthetic construct
  REGION 1..191: note = pYY-BEM3.33; tr|E2RL86|E2RL86_CANLF polypeptide sequence
MNPLQEETFYQQFSNQRVPKPTYQRRTYLCYQLKPHEGSVIAKVCLQNQEKRHAEICFIDDIKSRQLDPSQKFEITCYVTWSPCPTCAKKLIAFVNDHPHISLRLFASRLYFHWRQKYKRELRHLQKSGIPLAVMSYLEFKDCWEKFVDHKGRPFQPWNKLKQYSESIGRRLQRILQPLNNLENDFRNLRL

SEQ ID NO: 101 - protein, 226 aa, synthetic construct
  REGION 1..226: note = pYY-BEM3.34; tr|G1LWB0|G1LWB0_AILME polypeptide sequence
SSAAPASIHLLDEDTFTENFRNDDWPSRTYLCYKVEGPDQGSGVPLGQDKGILHNKPAQGPEPSRHAECYLLEQIQSWNLDPKLHYGVTCFLSWSPCAKCAQKMARFLQENSHVSLKLFASRLYTRERWDEDYKEGLRTLKRAGASIAIMTYREFEHCWKTFVLHDQEGSCFQPWPFLHKESQKFSEKLQAILQVGVLLLSLPPPLPSSPLSSPWPFPAPLRASTG

SEQ ID NO: 102 - protein, 238 aa, synthetic construct
  REGION 1..238: note = pYY-BEM3.35; tr|A0A1U7S7K7|A0A1U7S7K7_ALLSI polypeptide sequence
MGEHWQYAGSGEYIPQDQFEENFDPSVLLAETHLLSELTWGGRPYKHWYENTEHCHAEIHFLENFSSKNRSCTITWYLSWSPCAECSARIADFMQENTNVKLNIHVARLYLHDDEHTRQGLRYLMKMKRVTIQVMTIPDYTYCWNTFLEDDGEDESDDYGGYAGVHEDEDESDDDDYLPTHFAPWIMLYSLELSCILQGFAPCLKIIQGNHMSPTFQLHVQDQEQKRLLEPANPWGAD

SEQ ID NO: 103 - protein, 220 aa, synthetic construct
  REGION 1..220: note = pYY-BEM3.36; tr|A0A2R2X2J8|A0A2R2X2J8_PTEVA polypeptide sequence
MPRIGNMNLLSEKTFNYHFGNQLRVKKPQGRRRTYLCYKLKLPNETLVKGYFINKKKNHAEIRFINKIRSLNLDQTQSYKITCYITWSPCSYCAGKLVALVKSCPHLSLQIFTSRLYYHWLWKNQAGLRYLWKINISVLVMKEPEFADCWDNFVNHQSRRFKPWEKLTQYSNSTERRLLRILRINRTDLFLAQSSEQDPGLNDLVDAIKRLFLDAHRPRD

SEQ ID NO: 104 - protein, 198 aa, synthetic construct
  REGION 1..198: note = pYY-BEM3.37; tr|A0A151P6M4|A0A151P6M4_ALLMI polypeptide sequence
MAVEEEKGLLGTSQGWKIELKDFQENYMPSTWPKVTHLLYEIRWGKGSKVWRNWCSNTLTQHAEVNCLENAFGKLQFNPPVPCHITWFLSWSPCCQCCRRILQFLRAHSHITLVIKAAQLFKHMDERNRQGLRDLVQSGVHVQVMDLPDYRYCWRTFVSHPHEGEGDFWPWFFPLWITFYTLELQHILLQQHALSYNL

SEQ ID NO: 105 - protein, 158 aa, synthetic construct
  REGION 1..158: note = pYY-BEM3.38; tr|A0A2K6MNR2|A0A2K6MNR2_RHIBE polypeptide sequence
IWLCFTMEIIKQCSTVSWKRGVFRNQVDPETHCHAERCFLSWFWEDTLSPNTNYQVTWYTSWSPCLDCAGEVAEFLARHSNVKLAIFAARLYYFWDTDYQQGLRSLSEEGTSVEIMGYEDFKYCWENFVYNGDEPFKPWKGLKYNFLFLDSKLQEILE

SEQ ID NO: 106 - protein, 182 aa, synthetic construct
  REGION 1..182: note = pYY-BEM3.40; tr|F1CGT0|F1CGT0_ANOCA polypeptide sequence
KAAILLSNLFFRWQMEPEAFQRNFDPREFPECTLLLYEIHWDNNTSRNWCTNKPGLHAEENFLQIFNEKIDIKQDTPCSITWFLSWSPCYPCSQAIIKFLEAHPNVSLEIKAARLYMHQIDCNKEGLRNLGRNRVSIMNLPDYRHCWTTFVVPRGANEDYWPQDFLPAITNYSRELDSILQD

SEQ ID NO: 107 - protein, 230 aa, synthetic construct
  REGION 1..230: note = pYY-BEM3.41; tr|C7AGG3|C7AGG3_HORSE polypeptide sequence
MDPQAPTQRGGLGQAYQGGDYVQAPGNGNTQHLLSEDVFKKQFGNQRRVTKPYYRRKTYVCYQLKLLRGPTIAKGYFRNKKKRHAEIRFIDKINSLGLDQDQSYEITCYVTWSPCATCACKLIKFTRKFPNLSLRIFVSRLYYHWFRQNQQGLRQLWASSIPVVVMGYQEFADCWENFADNRGNPFQSWEKLTEYSKGIKRRLQKILEPLNLNGLEDAMGNLKLGSVDLG

SEQ ID NO: 108 - protein, 197 aa, synthetic construct
  REGION 1..197: note = pYY-BEM3.42; tr|A0A250YMK7|A0A250YMK7_CASCN polypeptide sequence
MSLLKEDIFLYQFNNQQQVQKPYFRRRTYLCYQLEQPNGSRPQWPAKGCLQNKKGHHAEIRFIKRIHSMGLEQDQDYQITCYITWSPCLACACALAELKNHFPRLTLRIFASRLYFHWIRKFQMGLQHLYKSGVLVAVMSLPEFTDCWEKFVNHRQVFFTPWDKLEEHSRSIQRRLRRILQSWDVDDLTDDFRNLRL

SEQ ID NO: 109 - protein, 189 aa, synthetic construct
  REGION 1..189: note = pYY-BEM3.43; tr|B7T160|B7T160_SHEEP polypeptide sequence
MPWISDHVARLDPETFYFQFHNLLYAYGRNCSYICYRVKTWKHRSPVSFDWGVFHNQVYAGTHCHSERRFLSWFCAKKLRPDECYHITWFMSWSPCMKCAELVAGFLGMYQNVTLSIFTARLYYFQKPQYRKGLLRLSDQGACVDIMSYQEFKYCWKKFVYSQRRPFRPWKKLKRNYQLLAAELEDILG

SEQ ID NO: 110 - protein, 541 aa, synthetic construct
  REGION 1..541: note = pYY-BEM4.1; tr|A0A182D0J1|A0A182D0J1_BLAVI polypeptide sequence
MTNPESPPQAPCDFNEDALLNREPLRGSPIKFVSPVDYPDLVFALAGPVGVDIDYIQQSISDCLKSFDYSTEFIRITEIMQDIKCSKTIDCTDMLKEYQSKIEYANELRRAYRAKDLLAALTISAISKLREQIKERDEATNKSNIQPSRRKLAWVVRQLKTPEEVRLLRAVYGKQFVLVSIYSSPQRREDFLISKIKIKSRGTIDNNTSSEGAQRLIERDSKEDNEYGQNLSGTFCLGDIFVDSNNKESAIVSIDRFLNAFFGSNEISPTRDEYGMYLAKTASLRSCDLSRQVGAAIFSKTGEIISLGSNEVPKAGGGTYWTGDNADSRDIRLGHDPNEINKVEIFAEIISRLLEDKLLSNDLLNKDAASIVTILLSKNEGKRYKDLRVMDIIEFGRIIHAEMSAICDAARNGRAIIGATLFCTTFPCHLCAKHIVASGIGRIVYLEPYPKSYAKKLHSDSIQVEDHSDSEKVSFEPFIGISPSRYRELFEGGRRKDPFGEALKWKNDPRKPVIDVVVPPHFEAEKLVIAQLGKLIVSGTG

SEQ ID NO: 111 - protein, 330 aa, synthetic construct
  REGION 1..330: note = pYY-BEM4.2; tr|A0A2D6EXD2|A0A2D6EXD2_9ARCH polypeptide sequence
MIIGLVGTIGAGKQTIIDYLQEKYGYNALSCSDVLREILKKQGKPVTRDNLREIGNKTREEGGNGAIAKILLEKLRNNWKANYIVDSLRHPDEVSVLRTSPLFHLVAVDADLRIRFERVKARKREEEPTTLPAFVERDQKEMFGTGNEQRIRETMELADELVLNNGTVEELKQRIDDLNLVSDERLRPSWDDYFMRLARLAAQRSNCMSRKVGAIITKDRRVIATGYNGTPRGVKNCNEGGCERCNSAVAKGTAISECLCLHGEENAIIEAGRVRSEGATIYTSFLPCLWCTKMIIQAGLKEVVFSEVYDLHEASIKLFETSGVLIRRLK

SEQ ID NO: 112 - protein, 367 aa, synthetic construct
  REGION 1..367: note = pYY-BEM4.3; tr|F7YVM7|F7YVM7_9THEM polypeptide sequence
MNEFKYMSLALKLAKKGKYTTSPNPMVGAVIVKDGKILATGYHKKAGQPHAEINALSKLNFQAQNCEMYVTLEPCSHYGRTPPCADAIIRSGIRKVVIATLDPNPLVNGKGVEKLKNAGIEVVCGVLEEKAKKLNEKFFKYITTKIPFVALKIAQTLDGKIALKNGESKWITSEKSREYVHKLRMEYDAVLTGIGTILKDDPQLNVRLKKVYKQPLRIILDSKLKIPLSAKVLEDPSKVIILTTALADKEKLEELRSKGVEVIITNEKNGIVDLESALKILGEKKITSVMVEAGPTLLTSFLKESLFDKIYLFIAPKIFGADSKSVFSELGLEDISKSQKFSLESVKKIGEDLLLELYPKQLKKLEE

SEQ ID NO: 113 - protein, 449 aa, synthetic construct
  REGION 1..449: note = pYY-BEM4.4; tr|A0A3M6UNF1|A0A3M6UNF1_9CNID polypeptide sequence
MEEKSELENELMRSTSPKPSVPNGSKGNECEQRETRITKENLYMVLALWMEEFPVVEQTSSAKRLNKVGVVFVLPTDRVLAADCSRDGVHGVARVMVNHCGKLEGCKVFVSRKPCSLCAKLLVQSKVSRVFYLPIEPESENKGEIARADNLFKNSSVGQSVFVPCVEQKVLDKLEDKLPKEIITPDDISECRDNLLKKCGWSAEWFARAQASLPWPCFEGKMKSQVDNDFKSLIKWIAVVKAPMDKGVAFPKVKLTSDSRVVPDCDADNFPDSKTAYHMMIFAKMLARQTDDPKTGVGAVIVRGKVPDIVSLGWNGFPSKALYGEFPRASDDDRALQKKFPYVIHAEQNALMVRNVKDLTDGILFVTKPPCDECAPMIKLSGVKTIVIGEKIEKSRGGELSYNLIKEYIKEGIMTCYQMEATKTKAKRLASDPETRKRLKSSCSNSNDV

SEQ ID NO: 114 - protein, 414 aa, synthetic construct
  REGION 1..414: note = pYY-BEM4.5; tr|A0A2G3K826|A0A2G3K826_9BURK polypeptide sequence
MTKIIDDVNTAAAAVLDQATAAANQTTFAVGGVMVNNQTGEVISAIHNNVIIPLSNNVSFTFDPTAHGERQLVYWYYANKEALKLPEPNQITVITSLDPCAMCTGALLTAGFNVGVVAIDTYAGINCAQNFQFATLPANLRTKAQKNFGYYASGAANFKPLTRSYVGGPSVAFKNGVVTPANLRDCGTVFTQSVDTVRNTSNSTGLAPSQMSNPAELPSNSAILQAYRAIYKKAFTIKIDNPRLPDAQILTELKAVLADAPNARNAVAFIDPFGNLVLCMADAFNTSPVHAAFMNVTQEYAKTRWDLMNKYAQASTTDNPALYLTHPKYGTFVYLYAPDPDDSITIMSLGAYGSTMEGPIPNMFPSNLQFYYPPRNGAQFSELVPVVNELPPFYTQNVNISLMQVPGVTQAPTK

SEQ ID NO: 115 - protein, 308 aa, synthetic construct
  REGION 1..308: note = pYY-BEM4.6; tr|K1ZCJ4|K1ZCJ4_9BACT polypeptide sequence
MSSRAKKNRSTNLKKSIGQKSIENKPTDQKKDQVLVAYVPVIHEGYRRFFRHFPAVKELWLISQELSHELRSLQKDIRALKASETKKLLQTWGQFQKIKLLTPSSLAILQKTTTQLVFPDEEISHHLVEKYFAQNRVLFASFFLRWDKKSSLKKHDLQEYSEISNKEFDQMMIAIAQQEADKSDDWWRQVGGLIFKDETILLLAHNQHTPTEAEAYFAGDPRADFHQGEYLKISTAIHAEAYLIAQAAKQGISLEGADLYVTTFPCPVCAKQVAYSGIKRVFFREGYSLLDGETILKANGVKLIRVTV

SEQ ID NO: 116 - protein, 615 aa, synthetic construct
  REGION 1..615: note = pYY-BEM4.7; tr|A0A1G3PNQ8|A0A1G3PNQ8_9SPIR polypeptide sequence
MRDLPLLVLGLTGPMGAGCTRFARDISKMEPGKVIKKQGLLDQVAHEISELSKKASEIRLQCISNGKNSELAELKRLNRRLNAKLAERACLHVIAKSSLPEPLFISLNTIVIKIAVDSITAPEFAEWAKNHAKVADLLKWLRTQWESELTLYETWGQDAGRFSQDELEKMDAMFAEFERIGDEILKEDFETYFGKRNNDFSIRMFSENIRLSGNPFRPAENGGGGGKYDEPSMVMIARETDRYIRFYRTRSDQKRSHFFIIDEIKNPREAEYFRARHQNFFLVSIFSSSEIRASRMRRGLGHDAGVSDADFQHLFRELDSRDWGADDFDAHGLHRQNIYRCFNLADIAINNDVEDERFSEVLFNKFIRYYALMLSPGCVQPTPQETYMHLAYSLSLRSTCISRQVGAVITDLEDRILSLGWNEVPEGQIGCGLKVKKDYTDKENPLFEMEIWDNVITAEDLAVWDDEDSICVKDILSRIEIKTKLKSVSLTPEERADVLKALRIKRLEYSRSLHAEENAILQVASRGGVGLKDGTIYVTTFPCELCSKKIYQVGISKIYYTEPYPNSISEKVILKDGIRNIKILQFEGVKSYSYFKLFKPGFDKKDAQMLEGRGI

SEQ ID NO: 117 - protein, 291 aa, synthetic construct
  REGION 1..291: note = pYY-BEM4.8; tr|A0A1G0PGF4|A0A1G0PGF4_9BACT polypeptide sequence
MKHNNQLRKEIEKLLGQNSIIKNDELKKLQKEYKIETDELLISFLPYAAEFAKVPISKYKVGAVVLGKSGNIYFGSNMEFEAGALSATVHAEQSAVNNAWLNGETGINKIAVTAAPCGYCRQFLNELTTAKQLHVLLKDKNLEAAKVFKLTELLPEAFGPRDLEIEGGLMKVENHKLKIENINDELINAALEAANKSYAPYSKNYSGVSIQLSDGTIFSGRYSENAAYNPSLLPFQSALAFMNMNTKKGSNNKIVDAVLVEAVSNISQKDAAGTLLNSISKTKLRYYKIKN

SEQ ID NO: 118 - protein, 398 aa, synthetic construct
  REGION 1..398: note = pYY-BEM4.9; tr|A0A0P4WGY5|A0A0P4WGY5_9EUCA polypeptide sequence
MEENSSATSQPKCASRTKQGGNDLSTDMSNLSVGETKRTDFLPWDDYFMAVAFLSAMRSKDPSSQVGACIVNADKKIVGIGYNGMPIGCSDDELPWNKESLDPLQTKYMYVCHAEMNAIMNKNSSDLAGCCVYVALFPCNECAKLVIQAGIREVVFFSDKHQQKPETVASKKMLNMAGVAYRQYTPSQSKIELNLSLKEQEKSEPTADITQSSERDQNSKRKDYLSWEEYFMAMAHLSALRSKDPITQVGACIVNSKKKIVGIGYNGMPLGCNDDLMPWGNSSSNKLETKYMYVCHAGVNAIMNKNSCDVSGCTLYVALFPCNECAKVIIQAGIKTIIYASDTNKDQASILASKKMLDMAGIKYRADNLSQRKIVIDFKTIDWNSRFMNDHQNDPTCL

SEQ ID NO: 119 - protein, 259 aa, synthetic construct
  REGION 1..259: note = pYY-BEM4.10; tr|A0A3D8IG27|A0A3D8IG27_9HELI polypeptide sequence
MRKNILYFILTLFFLSGLYATSLPEDNVVSGVIYEKIDTVSAEVDHIYPMLALAIVYKDWQEKNMLNKQGHNIGLVIVDENNMPVFWVRNSVHATHNGTQHGEVRLVSNLLNCEGFNKYLDKYTLYTTLEPCIMCAGMLSMVQIPKVVYAQKDLSCGNTQEIISTAKYPRYYKAFTVENGYKKDLEECFEQYKICKNDSITDFLVNDSAKEIFRKASNDLQDYKVKFKENRRVIKVAQEFLQNIQTKDNLDVLQCPKNM

SEQ ID NO: 120 - protein, 256 aa, synthetic construct
  REGION 1..256: note = pYY-BEM4.11; tr|A0A351C8C4|A0A351C8C4_9BACT polypeptide sequence
MNELTKQSEHLRNEALRIATRSYVPYTGQQEGVIILLENGDLIPGVRVENASFQLTIPALQNALSTMYALQRTDISMIVSSIPFTDSDLAYTGGMAEIAWEMVGASLLLVAGAHIPEAGTFIDPARGENLLDVSREAALNAFIPESDFPVGSAIQTSDDVVIDGCNVEHSDWSKIICAERNVLSTARSYGLGQITTIYVSCPKEPGGTPCGACRQVIVELAPDATVWMDRGNQEPIAMKATKLLPGHFTGNVLKKQ

SEQ ID NO: 121 - protein, 301 aa, synthetic construct
  REGION 1..301: note = pYY-BEM4.12; tr|A0A1G6V2K7|A0A1G6V2K7_PEPNI polypeptide sequence
MPIVRVNEIGARLPEDWEALETAIWQAYVSREDLPDAGELDLTLVDDATIQELNKTHRQLDKSTDVLSFPMYDDRDDLAADVQAGLPVILGDIMISVPTAERQAQAYGHSFKREMAYLLVHGLLHIAGYDHMSAEEKSAMRRAEEAILADVDVPRDTAPSKTAAVLDEADVQALIDAARAARLQAYAPYSGYAVGAALLAADGRRFCGVNVENASYGATCCAERTALFAAVTAGARDFIALALVTEGDEPAPPCGLCRQALAEFSPDLAIYLAGPTGETYRRTSLAALFPEAFSLSTKESV

SEQ ID NO: 122 - protein, 528 aa, synthetic construct
  REGION 1..528: note = pYY-BEM4.13; tr|F2NP91|F2NP91_MARHT polypeptide sequence
MPVMETHALEARFKEALARLCPEGRLLAAVSGGGDSVALLYLLKAAGRDTIVAHLDHALRPDSAADAAFVEKLAQRLGFPLETEHVDVRALAHRKRINLEAAAREVRYAFLARVARRWKARCILTAHTLDDNAETVLLQILRGAGRGLGIRPLQRRVARPLLEFSRAELRAYLEARGARWLEDPTNRSLELDRNYLRHAVLPRITARFPHALEALARFSQAQQADDWALEALSARHLIPDRRWPVPAYRALPLERAPEALRRRAIRGVLEALGVRPEARLVADVEAALGGRAQTLPGGVVVRRQRGTLFFIPPTVRFPKVQPPAGLEARPPRPGDYLVFPYGRKRLVDFLNERGVPRELKRRWPVGAVGAEVRWVYGLWPEPDEDRYMRRALVLARAAARQGEVPIGAVLVRDGAVLAEAANAVEASRDATAHAELLALRTALRRVGEKVLPGATLYVTLEPCPMCYGAILEARVARVVYGVENLKAGAFTVHGLEPRVALEAGRVEGECAKVLKDFFARLRPGRDGA

SEQ ID NO: 123 - protein, 226 aa, synthetic construct
  REGION 1..226: note = pYY-BEM4.14; tr|A0A316TX77|A0A316TX77_9BACT polypeptide sequence
MINGYTPYSGNQNTCYVKGESGTFYPGVRIENVSYPLTISSVQAAVCSCLANSDNPVEYYTGDHQPELLQVWADEYDMKPGGKLPDSPLKLFDPLVPSIPDIKKELDVLTEKSVTPNSGFPVSALLQTEKGYIRGVNIELSSWALGLCAERVAISRALTAGYTQFKSIHIYAPEADFVSPCGACRQVLLEVMPDADTELYHGDGTLSKHIVSDLLPFGFTSHKLKK

SEQ ID NO: 124 - protein, 321 aa, synthetic construct
  REGION 1..321: note = pYY-BEM4.15; tr|R6VYG3|R6VYG3_9FIRM polypeptide sequence
MIHKGTQTIETKRLILRAFTPDDAEAAFENWMSDPKVTEFLRWKTHADISDSRKIVNEWANGSADPEFYQWAIVPKDVNEPIGTISVVDRNDALGIFHIGYCIGSKWWHKGITSEAFSAVIHFLFEEVGANRIESQHDPENIHSGDVMKKCGLTFEGTLRQADFNNRGIVDACVYSILQSEWQNNTSVWQRLYNAALTVQNDRVVSPFIDAGGVAAALMTKKGNIYTGICIDTASTLGMCAERNAVANMLTNGESRIDKIVAVMPDGKVGAPCGACREYMMQLDRDSGDIEILLDLETEKTVRLKDLIPDWWGAERFGDTE

SEQ ID NO: 125 - protein, 229 aa, synthetic construct
  REGION 1..229: note = pYY-BEM4.16; tr|A0A3C1HZ18|A0A3C1HZ18_9BACI polypeptide sequence
MGDIMENWNELSEPWKRCFLQAWKAYCHGSIPIGAVLVDSEGEIFLEGRNRVHELTAPEGQLCDCRIAHAEMNVLVQVKTSDYEKLSGATIYSTMEPCIQCFGAIILSRIKNISFAAIDDKLAGATTLEDRHGFIKSRNLNIAGPFSHLGEIQIILRTDFLLRIFDSEYADPLIAAHEKDYPIGVALGRHYHRNNRLQVAKKETIPFGELFNEFSFDIKRAREGYTLGK

SEQ ID NO: 126 - protein, 205 aa, synthetic construct
  REGION 1..205: note = pYY-BEM4.17; tr|A0A1M6KV24|A0A1M6KV24_9BACT polypeptide sequence
MEASQQNILLKIEGKGPVAEINFTVTLPEWLVEQVQSGSTVFLTQKEKMRFVLELARKNVAQETGGPFAAAVFSLESGELVSAGVNVVVESRCSSAHAEVVALSLAQKAVDSHDLGAAGLPRMVLVSSAEPCAMCMGAIPWSGVKQVICGARDEDVRSVGFDEGAKPLEWVEDFAERGIEVIRDVLREEATEVLWDYRERGGEIY

SEQ ID NO: 127 - protein, 207 aa, synthetic construct
  REGION 1..207: note = pYY-BEM4.18; tr|A0A2U0T9B4|A0A2U0T9B4_9RHIZ polypeptide sequence
METAELISRLLDVIEKDIAPVTAKGVARGNKLFGAAILKKSDLAVIVAETNNEIENPLWHGEMQAIKRFFELPADQRPATRDCLFLATHEPCSLCLSGITWSGFDNFYYLFSHQDSRDGFAIPYDIQILKSVYAVPEPETGTVSPARDLYNRSNDFWTSHGLQDMIAGLARSNREALLARIDDLNALYAELSERYQRDKGGKGIPLP

SEQ ID NO: 128 - protein, 231 aa, synthetic construct
  REGION 1..231: note = pYY-BEM4.19; tr|A0A2K9PN08|A0A2K9PN08_9FLAO polypeptide sequence
MSDKKESKIKISKTSESIELDEIHSLLSYSIVQKFWENDDRNGRGYNVGVILVDENKNIVDWDINSVNKTENSTQHGEMRLISRYLDKDELYSLKGYTMYPTLEPCAMCAGMMTMTNVYRTVNGQMDYFYSKALERLSIDTRECGGYPPYPRTVISEISPSSISTRLDAEYKQYTNAGNKPIITKFLSTYKAKTIYDDAFNQFINFKCKFPENKTKYENAIKFYNSLPESI

SEQ ID NO: 129 - protein, 330 aa, synthetic construct
  REGION 1..330: note = pYY-BEM4.20; tr|F4PWM7|F4PWM7_CAVFA polypeptide sequence
MRFSLSLLFVILSVLLAGVLACKDPYNPETVDYGQCASATKANYEVRSDSKVLTPADLPADELAVHESRMRHIIDIARVNNKKFVSSIYFPNGTLACIGINTGKPNMIAHGEIVAIQNCTEIHGISMYTNYSIYTTGEPCSMCASAILWSRFKTVVWSTYNSDLYCKICMSNIPIDSSYIFSRAYGLGIEAPVAIGGVVKAEGDAWFGTYCNRPTSIYYIAPKCACQDPAKVSPLKFTQTRTTVWVEGGDKVVTQWNAIISNPSNSTIVDPPIVISPSVVFKGAPWGISAASEPNTYKLSYNKVLFPGQTFSFGYSVYGLEEVAFTALEA

SEQ ID NO: 130 - protein, 193 aa, synthetic construct
  REGION 1..193: note = pYY-BEM4.21; tr|U7QZM1|U7QZM1_PHOTE polypeptide sequence
MNKTRRKLLATLGIMSISMSFIAQAGEKKTQVINNILSKQEITEHEKYMREAIKEAIKNPKHPFGAVIVNRNNGEILSRGVNTGRNNPILHGEIQAINHYITQYGNQGWENVALYTTGEPCSMCMSALVWIGIREVIWATSISVIRNSGIRQIDISAHEIAERASSFYNPITLVGGILANETDKLFLERKRGN

SEQ ID NO: 131 - protein, 319 aa, synthetic construct
  REGION 1..319: note = pYY-BEM4.22; tr|A0A081CH48|A0A081CH48_PSEA2 polypeptide sequence
MASRRHLLATQVTGNHRKLSLWHLRGWLSPYTKLVDAVYFLTTNSFYHSLQTPPVQSITMLLSSIITSLALAAQASAYREGLHPEFQSGLSINSVPATDRDHWMRLANSAIYYPPVSHPCPQAPFGTAIVNTTSNELICAIANRVGSTGDPTQHGEITAIQHCTNVMRKKGLSPQEIIAAWKQLSLYTNAEPCTMCLSAIRWAGFKEVIYGTSVGTISENGRNQIYIPSNLVLEKSYSFGHATLMLGNILTHETDPFFQHQFNESAPCPVGCERTQVGEARVKTCEPVPNWQKLVRLEYSEDSRVGSEPVAHTPLHLEL

SEQ ID NO: 132 - protein, 203 aa, synthetic construct
  REGION 1..203: note = pYY-BEM4.23; tr|A0A3D3HMU1|A0A3D3HMU1_9GAMM polypeptide sequence
MDYSDAILGAITSIRRNSKQPGVNVTDNVTDSSTQYNNDEYWMRRALALAREAGEAGEIPVGAVLVKDNQQVAGGFNQPIRSHDPAAHAEILTLREAGAVLGNYRLIDTTLYVTLEPCMMCAGALVHSRIKRLVFGAAEPKTGAAGSFIDLLTLPRLNHYMEVTGGVLGEECSVLLSDFFRRRRAEKKALKRQNSESGSDSAS

SEQ ID NO: 133 - protein, 270 aa, synthetic construct
  REGION 1..270: note = pYY-BEM4.24; tr|A0A1N5WT13|A0A1N5WT13_9ACTN polypeptide sequence
MLEKIERRLVAAAEAVVRSPSTGDAHTVAAAAMDANGDIYSGVNVFHFTGGPCAELVVIGSAAAANAPPLITIVAVGDGDRGVIAPCGRCRQVMLDLHPDVFVIVPTGDGQLAAKPVRELLPFGYVARTGSTAPRVVYFHPRHYDTISSGLKTATVRFQDSVQTGPAVFVFDDGESIRRLDAVVEKVESRRLDHLTEEDAHHEALPDSDALRDAIKTQYPMLGDGDVVDVATFRLTAISAPDPDPRSSYPPAVSRCNPAGPRADLLVGQS

SEQ ID NO: 134 - protein, 257 aa, synthetic construct
  REGION 1..257: note = pYY-BEM4.25; tr|X0SAC5|X0SAC5_9ZZZZ polypeptide sequence
MTKDGRVIASAHDTEVTDQDSTAHAEINAIRKASKIYRKDLTGCLIISTHEPCPMCTGSIIWSNISKVVYGVSIRDSIKAGRDMINLSCKEIIKKPNAEINIYDGILKKECLKLYNNDTRKLVKKFRKYEWINIEENLLNKRMQWFENNKTMIRKLKGNDLEKAYHLILMKIGIKRSEAPIVKKSESKIIFHSKNYCPSLEACIILDLDTREVCKEIYERPTEELIRRLNSKLRFTRNYDCIRPYSDYCEEIIILEK

SEQ ID NO: 135 - protein, 154 aa, synthetic construct
  REGION 1..154: note = pYY-BEM4.26; tr|A0A3B8IC10|A0A3B8IC10_9BACT polypeptide sequence
MPSHEDFIHQCLELGKEALLQGNPPVGSVIVWQDQVIGRGIENGRSSGDITQHAELLALQEAVATGQRDKLKEAIIYSTHEPCVMCAYPIRQYKIPTVVYSVAVPELGGHTSSWHLLTTEDVPKWGKAPKIITGISAEEVEALNAAFQDSLKKG

SEQ ID NO: 136 - protein, 180 aa, synthetic construct
  REGION 1..180: note = pYY-BEM4.27; tr|A0A2N9P8B9|A0A2N9P8B9_9FLAO polypeptide sequence
MFIFKLISPPVSIEVYQDKIIQKLYICFMENIFTDEYFMKKALQEAETAFQQGEIPVGAVIVIDNRIIARSHNLTEMLNDVTAHAEMQAITASANFLGGKYLKDCTLYVTLEPCQMCAGALYWSQISKIVYGATDEQRGYRAMGAQLHPKTKVISGIMQNECTHLMKDFFKQRRSKSTKD

SEQ ID NO: 137 - protein, 178 aa, synthetic construct
  REGION 1..178: note = pYY-BEM4.28; tr|K1KX30|K1KX30_9BACT polypeptide sequence
MVKNPVNNNELYFGKHSEIPMNEEQKAYMKMAVDLSRSGMESGKGGPFGCVIVKDGKVIGIGSNSVLETNDPTAHAEIVAIRDACRNLGHFQLDGCEVYTSCEPCPMCLGAIYWARPSKVFFANDKRDAAEAGFDDDFIYQELELPYEKRKIPFEQGMQDTAKEVFQEWILKEDKTLY

SEQ ID NO: 138 - protein, 196 aa, synthetic construct
  REGION 1..196: note = pYY-BEM4.29; tr|R4XI84|R4XI84_TAPDE polypeptide sequence
MSSEIEPPSTDVHKHAVAEAADESGAADAFMQIALQQAETALLNKEVPVGCVFVHQPTGTVLATGANQTNASLNGTLHAEFVAIESILRDHPPSIFRESDLYVTVEPCVMCASALRQLQVRKVYFGCGNDRFGGCGSVFSIHSDASKTGDAAYMVESGIFRKEAIMLLRRFYLLQNESAPKPALKSTRVLKEHFDE

SEQ ID NO: 139 - protein, 212 aa, synthetic construct
  REGION 1..212: note = pYY-BEM4.30; tr|A0A239CVF7|A0A239CVF7_9DELT polypeptide sequence
MSPASKKHFPSLFSFLLLTIGLICGTAHAQPQGHTADDTAATLANASLKEHEPFIRRCYQLAIDAGKKGNHPFGALLVHKGKIVLEAENTVLTDNDFTNHAEMNLIAEAARTLSRQIIPEATVYTSCAPCAMCTATLAMAGFTRIVYGVSHDALNKRFGLKGKSVSCPALFKTMGMELEFVGPVLEKEGLRVFDFWPEKDPHAQMLKKQARK

SEQ ID NO: 140 - protein, 320 aa, synthetic construct
  REGION 1..320: note = pYY-BEM4.31; tr|A0A1Q3NME1|A0A1Q3NME1_9BACT polypeptide sequence
MTEFNYDWAKLAFSSKRPLTNLKATFIIAPREISEKRFTQLLKEYLPKGDILLGISKEDYVEGLEGQPQFAMLQQKTLQKLIDKVNDASAHKVYTLRYFQRELPAIIEKLTPPRVVGIHGSWHHSFHTLPIYYLLSEKRIPYQLVAAFSDEDEARAYEVATDKKIVRPTLEGSFDDTTVLQLTDEVAKSSYDYGFQTGAILAEKVNGVYQPVAAGFNKVVPYQTYALLNGASRETNFSPANDMNHYDTIHAEMQILVEAAKQGISLKDKTLFVNLMPCPSCARTLSQTELSEIVYRIDHSGGYAVDLLTKVGKDIRRIVY

SEQ ID NO: 141 - protein, 180 aa, synthetic construct
  REGION 1..180: note = pYY-BEM4.32; tr|A0A2G6N4N7|A0A2G6N4N7_9DELT polypeptide sequence
MKERTVSYSDRHFMAEALEMAESALTQGEFPVGCVIADGTAVVARGHRTGTTAGAVNEIDHAEINALRHLGLAGEHLDRTDLTIYSTMEPCLMCFAAIVLSGINRIVYAYEDVMGGGTGCDLTGLPPLYRDAPLTLVAGVRRRASLNLFRRFFTDPENGYWAGSLLSRYTLNQTKDSHRL

SEQ ID NO: 142 - protein, 156 aa, synthetic construct
  REGION 1..156: note = pYY-BEM4.33; tr|A0A0G0RBB8|A0A0G0RBB8_9BACT polypeptide sequence
MQSVQYNKLTHLQRRALDEAEQVLENSYNPYSHFYVGACLISEDEQLIAGTNFENAAYGSAICAERAAVLRANAMSIRRFRGIAIIARGEDFNTTEVTGPCGSCRQVLYEISQVSGCDLQVILATSKKDKIVITTIRELLPLAFGPLDLGVDIGKY

SEQ ID NO: 143 - protein, 217 aa, synthetic construct
  REGION 1..217: note = pYY-BEM4.34; tr|A0A327L2Q5|A0A327L2Q5_9RHIZ polypeptide sequence
MVTSRDGEDEAMMARCVALSRIAVGKGEYPFGAVVAREGRIVAEAINRTIRDGDVSRHAEVIALARAQKAIGRRELRECSLYSNVEPCAMCSYCIREAWVGRVVYALGSPVMGGVSKWNILRDDGLSGRMPQVFDAAPEVVSGVLVEQAQAAWRDWSPLAWEMITLRGLMTDPSARPECRTRAARPRSLWHHLVALIERPPRPYVDPTSAAEGHADL

SEQ ID NO: 144 - protein, 162 aa, synthetic construct
  REGION 1..162: note = pYY-BEM4.35; tr|S2DR30|S2DR30_9BACT polypeptide sequence
MKMKKKIEITVSLEVIQKSEWSKEDRSLIERAIHAVEHAHAPYSNFMVGTALLLDNGQIFSANNQENVSFPVGICAERAVLSYAMGNFPNNRPVKLAVVAKRRSDSTWATVTPCGLCRQTINEYEVKFGHPIEILMLNPGEEILKASGIDQLLPFRFNDLNS

SEQ ID NO: 145 - protein, 153 aa, synthetic construct
  REGION 1..153: note = pYY-BEM4.36; tr|A0A369QGF1|A0A369QGF1_9BACT polypeptide sequence
MEEHEKWMHWCLNLAQQALQQGDFPVGAVVVQKGKLIGQGVEAGQLKKDITCHAEMEAIRDARQTINTADLQNCILYSTHEPCIMCSYVIRHHKISRVVVGTTVPEVGGSSSAYPLLSAPDISIWVAPPHLVTGVLAEACQALSQAYKQKFKK

SEQ ID NO: 146 - protein, 159 aa, synthetic construct
  REGION 1..159: note = pYY-BEM4.37; tr|A0A1W6X4U4|A0A1W6X4U4_9RHIZ polypeptide sequence
MTNPSRQERWDRRFLELAKVFGTWSKDRSAGTGCVIVGPDRLLRASGYNGFARGIDDEVPERHERPAKYSWTEHAERNAIYNAAKLGISLDGCTAYVNWFPCIDCARAIVQAGIVRLVGLHPDHADQRWGSEFKFATEMLRESGIEIILYDIPELAARK

SEQ ID NO: 147 - protein, 490 aa, synthetic construct
  REGION 1..490: note = pYY-BEM4.38; tr|A0A238BW09|A0A238BW09_9BILA polypeptide sequence
MEEMARKIRTKAKKANSYCNTMTFLISKASIVLLKAECKRIELTVVIFRFLIKMNASEPNNELCDMTVIKSMLKITHVIFDLDGLLIDTEVVFSKVNQCLLSKYNKKFTPHLRGLVTGMPKKAAVTYILEHEKLSAKVDVDEYCKKYDEMAEEMLPKCSLMPGVMKLVRHLKTHSIPMAICTGATKKEFEIKTRYHKELLDLISLRVLSGDDPAVKRGKPAPDPFLVTMDRFKQKPEKAENVLVFEDAANGVCAAIAAGMNVIMVPDLTYMKIPEGLQNKINSFSDNLIISNDLNVALMSLKKELSEEEVHFLNRAFEIAVDAVLNNEVPVGCVFVFEGQEVAFGRNDVNRTKNPTYHAEMVALKMMKQWCMDNGRDLEEIMRRTTLYVTLEPCIMCASALYHLRLKKILYGAANERFGGLVSVGTREKYGAKHFIEIMPNLSVDRAVKLLKEFYEKQNPFCPEEKRKVKKPKKSGNNNDNSDDAVALNV

SEQ ID NO: 148 - protein, 159 aa, synthetic construct
  REGION 1..159: note = pYY-BEM4.39; tr|A0A1J5H6Z0|A0A1J5H6Z0_9BACT polypeptide sequence
MAYQPSEKFMQMAIDKTREGVLSGQTPFGACIVKDGKVVACEHNTVWQDTDITSHGEVHTIRAACKAIGSIDLSGCILYSTCEPCPMCFSAIHWARIDTVVYGAFIADAQDAGFNELTISNEKMKEFGGSPVNFISGFMRDENVALFKLWKEQGANNVY

SEQ ID NO: 149 - protein, 168 aa, synthetic construct
  REGION 1..168: note = pYY-BEM4.40; tr|A0A3C2D945|A0A3C2D945_9BACT polypeptide sequence
MKTTEIRIIVHEYQNIDELTENDQYLLHEARRITEFAYAPYSGFHVGAAILLGNGMIVKGNNQENSAYPSGLCAERVALFYANANYPDSEVKTIAISAAKNGILVNDPIKPCGGCRQTLSEAEVRFGSPIRIILDGQDSILVLHGVESLLPLSFSKKDLASPLAATGR

SEQ ID NO: 150 - protein, 214 aa, synthetic construct
  REGION 1..214: note = pYY-BEM4.41; tr|A0A1I7EYS3|A0A1I7EYS3_9BURK polypeptide sequence
MKFKLDPSRPPDEDDYYLGVALAVRRKANCTGNRVAAVIVKNKRVIATGYNGVPEDMPNCLDGGCLRCSNPGGQFKSGTRYDLCICVHAEQNALLTAARFGISVEGAHLYTTMQPCFGCAKEILQAKIEKVFYLHPWVPTDVDPVMDAAMKAEYAKIIGKLKVKKLDFDDPVATWAVTTMRQAALASDKNPDKKTPPKTAKKKVAKKKSRTSPR

SEQ ID NO: 151 - protein, 155 aa, synthetic construct
  REGION 1..155: note = pYY-BEM4.42; tr|H8GQX8|H8GQX8_METAL polypeptide sequence
MNHEHFMRRAIELARQAPQYPFGAVIVRRDDGQCVGQGFNRSDLNPTYHGEMVAINDCAVRHCAEDWRGFDLYTTAEPCAMCQGAIEWAGIGRVFYGTSIPYLQKLGWWQIDLRAAEVSARAVFRDTLIVGGILETECNALFAAARRGCFGTGSE

SEQ ID NO: 152 - protein, 156 aa, synthetic construct
  REGION 1..156: note = pYY-BEM4.43; tr|A0A0S8HZN3|A0A0S8HZN3_9CHLR polypeptide sequence
MDEHDIRFLRASFDVARNARKNGNHPFGALLVDEHGRIVMEAENTVITAKDCTGHAETNLMREASSKYDSDFLANCTIYTSTEPCPMCAGAIFWSNVRRVVYGLSEESLYEIAGRGSEEVLFLSCREIFERGKKLIEVIGPLLEDEAREVHMGFWR

SEQ ID NO: 153 - protein, 193 aa, synthetic construct
  REGION 1..193: note = pYY-BEM4.44; tr|E3SF31|E3SF31_9CAUD polypeptide sequence
MKPTTVLQIAYLVSQESKCCSWKVGAVIEKNGRIISTGYNGSPAGGVNCCEHAEEQGWLLNKPKPVLIPGHKSECVRFSQVDRFVLAKAHREAHSAWSKNNEIHAELNAILFAARMGSSIEGATMYVTLSPCPDCAKAISQSGIKKLVYCETYDKNIPGWDDILKNAGIEVFNVPKRSLDKLNWENINEFCGE

SEQ ID NO: 154 - protein, 330 aa, synthetic construct
  REGION 1..330: note = pYY-BEM4.45; tr|F8AAC6|F8AAC6_THEID polypeptide sequence
MIRAPWHEYFMLLAKIVALRSGCNSRPSGAVIVKNKRILATGYNGPMPGAWHCTDRGPGYCFRREKGIPDIDKYNFCRATHAEANAIAQAARFGISVEGASLYCTLAPCYVCLKLIASAGIKKVYYEHDYGSRDFERDQFWKEAIKEAGLEKFEQITVSQEVMEQLQEILPYPTSKRRLAPTEFLDEFEDGKKYGVPSIEVLFNKLNYLTRQALKDITFVIEKTTVTEEPEGISFYLSGKMVELSELINTVKKQINADQNFYFLAKHNAIEAKIEILREAENIRLKAFLNECPLESFKRIAESLDYILYQVSNSLSLPTRLELSVNLLRI

SEQ ID NO: 155 - protein, 158 aa, synthetic construct
  REGION 1..158: note = pYY-BEM4.46; tr|A0A2H4ZNK4|A0A2H4ZNK4_9EUKA polypeptide sequence
MKKQLSRKIQEEWMSRLLRNAYDAGTYGEVPIAAVILNESGQCIGWGRNCREKDQNPLGHAEIIALRQASYLKKSWRFNECTMLVTLEPCPMCAGALLQARINHIIYGASDYKRGGFGGVLDLSKNSSAHHKIEITRGVKSIQSCQLLETWFRRRRRV

SEQ ID NO: 156 - protein, 176 aa, synthetic construct
  REGION 1..176: note = pYY-BEM4.47; tr|A0A239N5N1|A0A239N5N1_9PSED polypeptide sequence
MEGRAGIIPFDEGGAAMGPAEEDSPMQHLAYMREALALARANVEAGGRPFGAVLVRDGEVIARAANGTHLDHDPTAHAELLALRAAGRALGSPRLDGCVVYASGHPCPMCLAAMHLSGVSAAYYAYSNADGEPYGLSTAAVYAQMAQPVEWQSLPLQALRPEDEEGLYGFWRERRP

SEQ ID NO: 157 - protein, 199 aa, synthetic construct
  REGION 1..199: note = pYY-BEM4.48; tr|A0A328VTR2|A0A328VTR2_9PSED polypeptide sequence
MHPEHLALLQQAPASTHADDTWARLCCEQALLAVEEGCYAVGALLVDGAGELLCSGRNQVFAPAYASAAHAEMRVLDQLEAEHAQVDRRSLTLYVSLEPCLMCYGRILLAGITRVRYLARDRDGGFALRHGRLPPAWANLASGLSVVQAKADPYWLDLAEHAIGRLQDRQTLRQRVIRAWRGQRTLTDEFSSTKRTHSG

SEQ ID NO: 158 - protein, 402 aa, synthetic construct
  REGION 1..402: note = pYY-BEM4.49; tr|A0A103YG48|A0A103YG48_CYNCS polypeptide sequence
YIRELHASSLRRDEHEIQNPKILVIVDRLSSPSLHVSLSLSLSLVIFPPFIPLNQTPTHMENAKVVEAKDGTIAVASAFSGHQEVVQDRDHKFLTRAVEEAYKGVECGDGGPFGAVVVHKDEVVASCHNMVLKHTDPTAHAEVTAIREACKKLNKIELSDCEIYASCEPCPMCFGAIHLSRIKRLIYGAKAEAAIAIGFDDFIADALRGTGFYQKAHLEIKQADGNGAMIAEQVFEKTKAKFAIDHKFLTRAVEEAYKGVECGDGRPFGALVVHKDEVVVSCHNMVLNYTDPTAHAEITAIREACKKLNRIELSDCEMYSSCEPCPMCFGAIQISRIKRLVYGAKAEASIASGIPIGDFISDALKGTGFHEKANFEIKQADGNGAMIAEQVFERTKAMFPKR

SEQ ID NO: 159 - protein, 195 aa, synthetic construct
  REGION 1..195: note = pYY-BEM4.50; tr|W5M1M8|W5M1M8_LEPOC polypeptide sequence
NSSTRESRVMAQMEINGGASPPKKPGKGQSAADQDMITGLINKALQAKEFAYCPYSNFRVGAALMTNDGRVFTGCNVENACYNLGVCAERTAILKAVSEGYESFRAIAVSSDLQDQFISPCGACRQVMREFGTGWDVFLTKVDGSYVRMTVDELLPMSFGPDDLKKKKVFSLQNGHEVSTQFYTHSPCEAGENNN

SEQ ID NO: 160 - protein, 134 aa, synthetic construct
  REGION 1..134: note = pYY-BEM4.51; tr|A0A3N5YPZ2|A0A3N5YPZ2_9ALTE polypeptide sequence
MSNSETEHIQALVDAAQAAQKQSYSPYSSFQVGAAIFADDGNTYSGCNIENVAYPLGQCAEATAIGMMIMQGAKRIEDIMIASPNDQVCPPCGGCRQKISEFGTAETKIHMVTRSGEVSTVTLGELLPLAFDSL

SEQ ID NO: 161 - protein, 162 aa, synthetic construct
  REGION 1..162: note = pYY-BEM4.52; tr|A0A2A9NC86|A0A2A9NC86_9AGAR polypeptide sequence
MTNSTLSNEDRTRLIQGAFQARKKTYSPYSNFPVGAALLTTDGRIIEGANIENASYGGTICAERTAIVKAVSDGYRHFAGIAVTTKMPTRVSPCGICRQVLREFCSLDMPVLLVPGDYPQRNPVDDDGADKPGVITEGGVRETTLGALLPDSFGPENLPPRA

SEQ ID NO: 162 - protein, 163 aa, synthetic construct
  REGION 1..163: note = pYY-BEM4.53; tr|A0A2D6RD43|A0A2D6RD43_9GAMM polypeptide sequence
MNIENLITENDETLIRRCIELAGESVKNGDKPFGALLAKDGNIIFESSNNAKTKVPYHAEILTLMDAQDKLNTTDLSDYALYSNCEPCPMCSFMIREYKLDKVVFSVHSPYMGGQSRWNILEDDVLTRFKPYFSKPPNVVGGVLESEGKRIFDKVGLWMFGKE

SEQ ID NO: 163 - protein, 204 aa, synthetic construct
  REGION 1..204: note = pYY-BEM4.54; tr|A0A0H3AVL6|A0A0H3AVL6_BRUO2 polypeptide sequence
MHAKGYSQQERRIIPFANRFRFRELCSNKSLHGLRAKFPEQYTKWDPMRKAASITKANSATPMDIALEEAHAAGERGEVPIGAVIVRDGEIIARAGNRTREFNDVTAHAEILTIRQAGEMLGSERLIDCDLYVTLEPCAMCAAAISFARIRRLYYGASDPKGGGIEHGGRFYTQPTCHHAPEIYPGFCEADARKILKDFFREKR

SEQ ID NO: 164 - protein, 165 aa, synthetic construct
  REGION 1..165: note = pYY-BEM4.55; tr|A0A242H531|A0A242H531_9ENTE polypeptide sequence
MFIVKNNIEVIQQQAELDAKFMKQALKLAKDASNNGNEPFGAVLVKNDKVILTGENQIHTESDPTYHAELGIIRDFCTSQKITDLSEYTLYTSCEPCCMCAGAMVWSNLDRMVYGLGHDELAEIAGFNIMIGSEEIFSKSPNRPEVAKGVLKEAAVPVYVDYFQR

SEQ ID NO: 165 - protein, 181 aa, synthetic construct
  REGION 1..181: note = pYY-BEM4.56; tr|A0A2R6XZE2|A0A2R6XZE2_9BACL polypeptide sequence
MSGRISWHEYFMAQAKLIALRATCTRLMVGAVIVRDRRVIAGGYNGSIAGDEHCIDVGCKVRDGHCIRTIHAEQNALMQCAKFGVSTDGAELYVTHFPCLNCTKLLIQAGIRHIYYEVPYRVDPYAIELLEKAGVGTTQITVDLNAYVQVMSKVSTDPALTYVPESKAQKDEYGQSVGKIV

SEQ ID NO: 166 - protein, 173 aa, synthetic construct
  REGION 1..173: note = pYY-BEM4.57; tr|A0A139SHT6|A0A139SHT6_9BACT polypeptide sequence
MSEANASSESLPSRNSPVELIAEAAGKFGRRPTWDEYFMATAVLISTRSSCERLNVGCVIVTAGESHKNRIVAAGYNGHLPGSPHTSRMRDGHEQATVHAEQNAISDAARRGSSVEGCTAYVTHYPCINCAKILASAGIAKICYRLDYHNDPLVKPMLAEAGIEIVQLGEAAS

SEQ ID NO: 167 - protein, 170 aa, synthetic construct
  REGION 1..170: note = pYY-BEM4.58; tr|A0A261DBH2|A0A261DBH2_9RICK polypeptide sequence
MVMKKKLITVKRSTEFNNFFMEEALKQAQFALDKNEIPVGAIIVNRITNKVIAKAHNIVEQTKNPVLHAEIVAINQSCQILSSKNLSDCDMYVTLEPCVMCSGAISFARIGRLFYAANDPKQGAIENGGRFFNSKSCFYRPEIYSGFSAKISENLIKEFFYNVRYQKCNP

SEQ ID NO: 168 - protein, 146 aa, synthetic construct
  REGION 1..146: note = pYY-BEM4.59; tr|A0A2N0XZK6|A0A2N0XZK6_9VIBR polypeptide sequence
MTDNSLHESYMRQAFELSKSALPGCRPNPPVGCVFVKDGEVVSSGFSQPPGNHHAEAGAIAAYTGSYDGLVAYVTLEPCSFQGRTPSCAKALVRVRPEKVYVAILDPDTRNSGAGIKILEDAGIDVEVGLLGEEVASFLNPYLIRN

SEQ ID NO: 169 - protein, 159 aa, synthetic construct
  REGION 1..159: note = pYY-BEM4.60; tr|A0A1V5R0F9|A0A1V5R0F9_9BACT polypeptide sequence
MTKKETTKLHALDDFCMKKALLLAKRAFRADEVPVGALVVDSSNKVIGRGYNQVEKRKSQRAHAEQLAIEQACKKIGDWRLEGCTLYVTLEPCTMCMGLIKLSRIERVVFGAASPLFGYQLDKNRKSQLYKKGVIKIRKGVGKATAAALLKDFFKNKRM

SEQ ID NO: 170 - protein, 167 aa, synthetic construct
  REGION 1..167: note = pYY-BEM4.61; tr|A0A2W0H8Y3|A0A2W0H8Y3_9BACI polypeptide sequence
MKNNGRLDHEYFMTEALQEAKEAGQRGDLPIGAVIVHNGRIIARGSNMRKTAGIKISHAENNAMHNCAPYLMKHASECVIYTTLEPCIMCLTTLVMANIDSIVFAADDKYMNMKPFIDANSYIRDRIHQYKGGVCRGESEALLRKYSPYAAELALNGTHPHHRKGGA

SEQ ID NO: 171 - protein, 165 aa, synthetic construct
  REGION 1..165: note = pYY-BEM4.62; tr|A0A261BDB7|A0A261BDB7_CAERE polypeptide sequence
LYKLYIFRMTTTKANLTQFEQELVDKAVGAMEKAYCKYSGFKVGAALVCEDGEIIIGANHENASYGATICAERSAMVTALTKGHRKFKLLAVATELEAPCSPCGICRQYLIEFGDYKVILGSSTSDQIIETTTYGLLPYAFTPKSLDDHEKEAEERNHQEGEKKH

SEQ ID NO: 172 - protein, 162 aa, synthetic construct
  REGION 1..162: note = pYY-BEM4.63; tr|A0A2E1PHI6|A0A2E1PHI6_9GAMM polypeptide sequence
MKELLIHSWLMLNSNSKLIMERVIELSEINLKNGKIPIAAVIVDKKNYEIISESQNEDSPIGHAELLAITKALKKLNTNRLDSTNLFVTIEPCPMCAYAISKCHINRLYFGSEDEKGGGVINGPRIFESHNLKKIDYVSHCYHEKTTQLMQSFFQLKRNQQL

SEQ ID NO: 173 - protein, 133 aa, synthetic construct
  REGION 1..133: note = pYY-BEM4.64; tr|A0A378LUA7|A0A378LUA7_9GAMM polypeptide sequence
MDTIIKKMISNAHNTLAHSYSPYSKFSVASCICTDKDNFYTGVNVENSAYGLAICAETSAISAMVTAGEKRIKSMVVMAGTNILCSPCGACRQRIYEFSTPDTLIHLCDKNSILRTFKINELLPEAFKFDFNP

SEQ ID NO: 174 - protein, 370 aa, synthetic construct
  REGION 1..370: note = pYY-BEM4.65; tr|A0A139HQ78|A0A139HQ78_9PEZI polypeptide sequence
MADSLKSKPGHARHDTALIHGLSQSDVQKLSESCVDAKSKAYCPYSHFRVGCAVLLANGDVVQGANVENAAYPVGTCAERVALGTAVGAKKGDFRALAVSTDISPPASPCGMCRQFIREFCELNTPILMYDKDGKSVVMTLEQLLPMSFGPDKLLPPGQLENGLMQTQTQSSFVTRAFSTTSSRRQDDTPQVPQSHYDFFPQTFPQGPPPKTSFSPDLKQLRKEFLQLQAKAHPDLAPQDQKRRAEALSMRINEAYKTLQSPLRRAQYLLSQQGIDVEDETAKLDDSSLLMEVMEAREAVEEVEDEEQLNEIRAENNGRIEESVRVLEDAFRDNEFEKAAQEAIRLRYWVNIEESIQGWEKGNGGGILHH

SEQ ID NO: 175 - protein, 165 aa, synthetic construct
  REGION 1..165: note = pYY-BEM4.66; tr|A0A2A9FXV0|A0A2A9FXV0_9VIBR polypeptide sequence
MCNLKENKDMDKYFHFACDATIEGMREGTGGPFGATLTRNGEVVCSVANTVLKDMDISGHAEMVAVREACKKLDTLDLSDCVMYATCEPCPMCVSVMLWAGIKTCYYASTHLDAAKHGFSDQQLRDYLDGSDTSTLNMVHIEDNRDDCAKIWTEFRHLNETKNDG

SEQ ID NO: 176 - protein, 509 aa, synthetic construct
  REGION 1..509: note = pYY-BEM4.67; tr|A0A1A8AG96|A0A1A8AG96_NOTFU polypeptide sequence
MEHSDRWSRAEPGLSTSSRETRDGSTQTDCKLQGHGPRLSKVNLFTLLSLWMELFPQEQDEENGQSQIRRSGLVVVREGKVVGLHCSGADLHAGQAAILQHGASLANCQLFFSRRPCATCLKMIINAGVRQITFWPGDPEISMLTSNQTHSQRTSQSITEASLDATAVEKLKSNSRPQICVLMQPLAPGVLQFVDETSRRSDFMERMMDDDPELDSEKLFNSDRLRHLKDFCRHFLIQTDQRHKDILSQMGLKNFCVEPYFSNLRSNMTELVEVLAAVAAGMPQQHYGFYREESLSLDPHPVDVSQAVARHCIVQARLLSYRTEDPKVGVGAVIWAKGQSACCCGTGRLYLIGCGYNAYPAGSKYAEYPQMDNKQEDRERRKYRYIVHAEQNALTFRTRDIKPDECSMLFVTKCPCDECIPLIRGAGVKHIYTSDQDRDKDKGDISYLRFGSLKGVCKFIWQRSPPVSSASSLHLTNGCVGKHVRQAEQQIYKNKKLCTKGSSGSSDIC

SEQ ID NO: 177 - protein, 148 aa, synthetic construct
  REGION 1..148: note = pYY-BEM4.68; tr|A0A3E2VN88|A0A3E2VN88_9FIRM polypeptide sequence
MEKEITNMDKQKLIQMAVDGLGRSYAPYSHFHVSAALLCADGTVYTGNNIENAAYTPSVCAERCAIFKAVGDGRREFEAIAVCGGPDGVIEDYCPPCGVCRQVMREFCDPSSFRVLVAKTAEDYREYTLEQLLPDGFGPDHLTGSGER

SEQ ID NO: 178 - protein, 221 aa, synthetic construct
  REGION 1..221: note = pYY-BEM4.69; tr|A0A2D5ZRJ2|A0A2D5ZRJ2_9BACT polypeptide sequence
MARPVHLHTGERRTEEGATESRAVAAVATAITRAPRAPPRPATGRERDGPPPRRVFGGGLRVGDPSGYDRGESKPIGGPLTEKRSDWHSYFMRIAGEVATRATCDRKHVGAVIVRNRTILSTGYNGSIRGMPHCDDVGHDMVDGHCIATIHAEANAILQAARNGVMIQDGSIYITASPCWNCFKLVANAGLKRVYYGEFYRDKRSFEVARRLGIDLMHIEV

SEQ ID NO: 179 - protein, 155 aa, synthetic construct
  REGION 1..155: note = pYY-BEM4.70; tr|A0A1B8WPS3|A0A1B8WPS3_9BACI polypeptide sequence
MEGVQLIYQFQWGNLIMTVNKEDLYLIDVARNTIKTLYVDGKHHVGAAVRTKTGKIYSAVHLEANIGRVSVCAEAIALGKAISEGESEFDTIVAVRHPDPTQENQKIEVVSPCGICRELISDYGKGTNVILKNKEGYIKTVISDLLPNKYIREDN

SEQ ID NO: 180 - protein, 156 aa, synthetic construct
  REGION 1..156: note = pYY-BEM4.71; tr|A0A1W5ZQK9|A0A1W5ZQK9_9BACI polypeptide sequence
MNRFMERAVSLAAENVRVGGQPFGAVLVKDDELVAEGVNEMHLNYDVSGHAELLAIRRAQGELQTHDLSGYTMYASGEPCPMCLSAMYFAGIKDVFYCATVEEAAQVGLEKSKNVYDDLQKSKGERSLVMKQMPLEDDQEDPMKLWDERTNHNGTS

SEQ ID NO: 181 - protein, 340 aa, synthetic construct
  REGION 1..340: note = pYY-BEM4.72; tr|A0A378V0W4|A0A378V0W4_MYCFO polypeptide sequence
MVHAQFDPTARQALAATAVEAKTRKDLTWQQIADAAELSPAFVTAAVLGQHALPARSAEAVAALLGLDDDAALLLQTIPIRGSIPGGIPTDPTIYRFYEMLQVYGTTLKALVHEQFGDGIISAINFKLDVRKVADPEGGERAVITLDGKYLPPNPFDRVRYRGGLMDFAQRTIDIARQNVAEGGRPFATVIVKNGEILAESPNLVAQTHDPTAHAEILAIRKACTRIGTEHLIGATIYVLAQPCPMCLGSLYYCSPDEVVFLTTRDAYEPHYVDDRKYFELNMFYDEFAKPWDQRRLPMRYEPRDAAVDVYKLWQERNGGERRVPGAPTSTRPGKNPRGE

SEQ ID NO: 182 - protein, 157 aa, synthetic construct
  REGION 1..157: note = pYY-BEM4.73; tr|I3XF03|I3XF03_RHIFR polypeptide sequence
MKQRCMSPKSAQRFWDNDMHNNKDRPMSENELFVAAREAMAKAHAPYSKFPVGAAIRAEDGQIYTGANIENLSFPEGWCAETTAISHMVMAGQRKIMEVAVIAEKLALCPPCGGCRQRLAEFSGASTRIYLCDETGIKKSLALSDLLPHSFETEILG

SEQ ID NO: 183 - protein, 595 aa, synthetic construct
  REGION 1..595: note = pYY-BEM4.74; tr|F8IEF3|F8IEF3_ALIAT polypeptide sequence
MDAKELETRGWLCMRAVDVIDKKRRGEALAEEELRFLIEGYVAGRIPDYQMSAFLMAVVWRGMTREETLVLTRLLADSGERLDLSGIPGVKVDKHSTGGVGDKATLVVLPLVASIGVPVIKMSGRGLGHTGGTIDKLESIPGFRTDLSVAELVAQVRQVGIALGGQTADLAPADKKLYALRDVTGTVESLPLIASSVMSKKLAGGADAIVLDVKVGDGAFMKSRSDARRLARLMVEIGEAAGRRTVAVLSNMDQPLGCAIGNALEVAEAIRVLSGEGPFDLAEIALALAEEMTVLAGVAATREEARRMLRQSVAEGRALETLRRWIAAQGGDPAVVDDPSRLPQAPVQMPYLPKKAGFVAKLSALAFGLAAMRLGAGRETKEEAIDPSVGIVLHAKVGDRVQTHRPMFTVHARTGEDALRCIQELEAAIQISDDPVEAPPLILARIDRSEALPYADLMDAAREARDRAYVPYSGFAVGAALELADGRMVTGANVENASYGLTNCAERSAVFRAVAEGGPGTKPEIRAVAVIADSPEPVSPCGACRQVLAEFCSPDTPVYLGNLQGDVRETTVGALLPGAFTDAQMANVRRQDKEA

SEQ ID NO: 184 - protein, 153 aa, synthetic construct
  REGION 1..153: note = pYY-BEM4.75; tr|A0A1G3M638|A0A1G3M638_9SPIR polypeptide sequence
MKTTNINALDKWDLRFLQMAEHVAEWSKDPSTKVGAVIVRPDRTIASVGFNGFARGVRDTVERLWNRELKYPLTVHAELNAILSAHEPVRGHSLYVSPLSPCSNCAGVIIQSGIARVVAKCGQVNNPAQWSESFNLALTAFAEAGVSVILVEH

SEQ ID NO: 185 - protein, 177 aa, synthetic construct
  REGION 1..177: note = pYY-BEM4.76; tr|A0A3D9LFR2|A0A3D9LFR2_9MICC polypeptide sequence
MEQNDHGSSGAFSDPFEDDIPLTASLPRITGTGSGIDWQRLESTARAAMTRAYVPYSRFPVGAAALVEDGRVVAGCNIENASLGLTLCAECSLVSNLQMSGGGRIVAFYCVDGNGEVLMPCGRCRQLLYEFHAPGMRLMGPDGELTMDEVLPLAFGPADMTHLSDSAASTDDPGRTR

SEQ ID NO: 186 - protein, 172 aa, synthetic construct
  REGION 1..172: note = pYY-BEM4.77; tr|A0A3B9YGB5|A0A3B9YGB5_9BACT polypeptide sequence
MAKPISKKYRKLIETAKAARKKAYSPYSRYQVGAAVLTESGRIYSGANMENASYGLCMCAERVAIANAVTRGEKVLQAVCVVGKKARPCGACRQVMLEFSTKETELLMVDIDPNARRDTVIRTRVYSMLPNPFDPFESGMLPQHPQNLLRRRKSPQPRRKRRSRPVHREVSR

SEQ ID NO: 187 - protein, 391 aa, synthetic construct
  REGION 1..391: note = pYY-BEM4.78; tr|A0A182F569|A0A182F569_ANOAL polypeptide sequence
MPRPSQFRVSSSQSLSNSQIQASQSSDSVVDITSYVNAVVKALLNLSCTKTIIKRADLVNIALKGNGRLIGRVLQDANIELKEIYGYELIEVEKSKTMILCSTLAAGSMDELNDANRRRYTFLYLILGYIFMKNGSVPETIVWEFLETLGIEEQQEHNYFGDVRKLYDSLFKQAYLTRTKQALEGLNDDVMLISWGVRSKHEVSKKDILAGFCKVMNRDPVDFKAQYIEANEKDDKMNNNINGTVDGRNTVEYSSLDASVKELIEAAIKVRNNAYCPYSNFAVGAALRTVGGDIVTGCNVENGTFGPSVCAERTAVCKAVSEGHREFTAVAVVAFQETEFTAPCGTCRQTLSEFSRKDIPIYLVKPSPVRVMVTSLFQLLPHAFSPSFLNK

SEQ ID NO: 188 - protein, 151 aa, synthetic construct
  REGION 1..151: note = pYY-BEM4.79; tr|A0A264Z0D4|A0A264Z0D4_9BACI polypeptide sequence
MEPKKLIEEAIVASKQAYVQYSNFHVGAALLTKDGKLYHGCNIENASYGLTNCAERTAIFKAVSEGEKEFQAIAVVGDTEGPISPCGACRQVLAEFFSPDTVVILANLKGDHVVTNINELLPGFFSSKDLQKKVKNCFEKNALGSSCLRPI

SEQ ID NO: 189 - protein, 229 aa, synthetic construct
  REGION 1..229: note = pYY-BEM4.80; tr|A0A1L9Q1R3|A0A1L9Q1R3_ASPVE polypeptide sequence
MPLSAEEAALVETATATINSIPLSEDYSVASAAKASDGRVFTGVNVYHFTGGPCAELVVLGVAAAAGAAQLTHIVAVANEQRGILSPCGRCRQVLLDLQPNIQVIVGKEGSEQSVPVAQLLPFSYRQPDQHTPVIFKALTSSGPVVVDFFATWCGPCKAVAPVVGKLSETYTDVRFIQVDVDKARSISQEHDIRAMPTFVLYKDGKLLDKRVVGGNMKELEEQIKAIIA

SEQ ID NO: 190 - protein, 18 aa, synthetic construct
  REGION 1..18: note = synthetic peptide
KRTADGSEFESPKKKRKV

SEQ ID NO: 191 - protein, 16 aa, synthetic construct
  REGION 1..16: note = synthetic peptide
KRPAATKKAGQAKKKK

SEQ ID NO: 192 - protein, 17 aa, synthetic construct
  REGION 1..17: note = synthetic peptide
KKTELQTTNAENKTKKL

SEQ ID NO: 193 - protein, 19 aa, synthetic construct
  REGION 1..19: note = synthetic peptide
KRGINDRNFWRGENGRKTR

SEQ ID NO: 194 - protein, 16 aa, synthetic construct
  REGION 1..16: note = synthetic peptide
RKSGKIAAIVVKRPRK

SEQ ID NO: 195 - protein, 7 aa, synthetic construct
  REGION 1..7: note = synthetic peptide
PKKKRKV

SEQ ID NO: 196 - protein, 30 aa, synthetic construct
  REGION 1..30: note = synthetic polypeptide
MDSLLMNRRKFLYQFKNVRWAKGRRETYLC

SEQ ID NO: 197 - protein, 1368 aa, Streptococcus pyogenes [sequence omitted]

SEQ ID NO: 198 - DNA, 4104 bp, Streptococcus pyogenes
  misc_feature 1..4104: note = wild type spCas9 polynucleotide sequence
  source 1..4104: mol_type = genomic DNA
atggataagaaatactcaataggcttagatatcggcacaaatagcgtcggatgggcggtgatcactgatgattataaggttccgtctaaaaagttcaaggttctgggaaatacagaccgccacagtatcaaaaaaaatcttataggggctcttttatttggcagtggagagacagcggaagcgactcgtctcaaacggacagctcgtagaaggtatacacgtcggaagaatcgtatttgttatctacaggagattttttcaaatgagatggcgaaagtagatgatagtttctttcatcgacttgaagagtcttttttggtggaagaagacaagaagcatgaacgtcatcctatttttggaaatatagtagatgaagttgcttatcatgagaaatatccaactatctatcatctgcgaaaaaaattggcagattctactgataaagcggatttgcgcttaatctatttggccttagcgcatatgattaagtttcgtggtcattttttgattgagggagatttaaatcctgataatagtgatgtggacaaactatttatccagttggtacaaatctacaatcaattatttgaagaaaaccctattaacgcaagtagagtagatgctaaagcgattctttctgcacgattgagtaaatcaagacgattagaaaatctcattgctcagctccccggtgagaagagaaatggcttgtttgggaatctcattgctttgtcattgggattgacccctaattttaaatcaaattttgatttggcagaagatgctaaattacagctttcaaaagatacttacgatgatgatttagataatttattggcgcaaattggagatcaatatgctgatttgtttttggcagctaagaatttatcagatgctattttactttcagatatcctaagagtaaatagtgaaataactaaggctcccctatcagcttcaatgattaagcgctacgatgaacatcatcaagacttgactcttttaaaagctttagttcgacaacaacttccagaaaagtataaagaaatcttttttgatcaatcaaaaaacggatatgcaggttatattgatgggggagctagccaagaagaattttataaatttatcaaaccaattttagaaaaaatggatggtactgaggaattattggtgaaactaaatcgtgaagatttgctgcgcaagcaacggacctttgacaacggctctattccccatcaaattcacttgggtgagctgcatgctattttgagaagacaagaagacttttatccatttttaaaagacaatcgtgagaagattgaaaaaatcttgacttttcgaattccttattatgttggtccattggcgcgtggcaatagtcgttttgcatggatgactcggaagtctgaagaaacaattaccccatggaattttgaagaagttgtcgataaaggtgcttcagctcaatcatttattgaacgcatgacaaactttgataaaaatcttccaaatgaaaaagtactaccaaaacatagtttgctttatgagtattttacggtttataacgaattgacaaaggtcaaatatgttactgagggaatgcgaaaaccagcatttctttcaggtgaacagaagaaagccattgttgatttactcttcaaaacaaatcgaaaagtaaccgttaagcaattaaaagaagattatttcaaaaaaatagaatgttttgatagtgttgaaatttcaggagttgaagatagatttaatgcttcattaggcgcctaccatgatttgctaaaaattattaaagataaagattttttggataatgaagaaaatgaagatatcttagaggatattgttttaacattgaccttatttgaagatagggggatgattgaggaaagacttaaaacatatgctcacctctttgatgataaggtgatgaaacagcttaaacgtcgccgttatactggttggggacgtttgtctcgaaaattgattaatggtattagggataagcaatctggcaaaacaatattagattttttgaaatcagatggttttgccaatcgcaattttatgcagctgatccatgatgatagtttgacatttaaagaagatattcaaaaagcacaggtgtctggacaaggccatagtttacatgaacagattgctaacttagctggcagtcctgctattaaaaaaggtattttacagactgtaaaaattgttgatgaactggtcaaagtaatggggcataagccagaaaatatcgttattgaaatggcacgtgaaaatcagacaactcaaaagggccagaaaaattcgcgagagcgtatgaaacgaatcgaagaaggtatcaaagaattaggaagtcagattcttaaagagcatcctgttgaaaatactcaattgcaaaatgaaaagctctatctctattatctacaaaatggaagagacatgtatgtggaccaagaattagatattaatcgtttaagtgattatgatgtcgatcacattgttccacaaagtttcattaaagacgattcaatagacaataaggtactaacgcgttctgataaaaatcgtggtaaatcggataacgttccaagtgaagaagtagtcaaaaagatgaaaaactattggagacaacttctaaacgccaagttaatcactcaacgtaagtttgataatttaacgaaagctgaacgtggaggtttgagtgaacttgataaagctggttttatcaaacgccaattggttgaaactcgccaaatcactaagcatgtggcacaaattttggatagtcgcatgaatactaaatacgatgaaaatgataaacttattcgagaggttaaagtgattaccttaaaatctaaattagtttctgacttccgaaaagatttccaattctataaagtacgtgagattaacaattaccatcatgcccatgatgcgtatctaaatgccgtcgttggaactgctttgattaagaaatatccaaaacttgaatcggagtttgtctatggtgattataaagtttatgatgttcgtaaaatgattgctaagtctgagcaagaaataggcaaagcaaccgcaaaatatttcttttactctaatatcatgaacttcttcaaaacagaaattacacttgcaaatggagagattcgcaaacgccctctaatcgaaactaatggggaaactggagaaattgtctgggataaagggcgagattttgccacagtgcgcaaagtattgtccatgccccaagtcaatattgtcaagaaaacagaagtacagacaggcggattctccaaggagtcaattttaccaaaaagaaattcggacaagcttattgctcgtaaaaaagactgggatccaaaaaaatatggtggttttgatagtccaacggtagcttattcagtcctagtggttgctaaggtggaaaaagggaaatcgaagaagttaaaatccgttaaagagttactagggatcacaattatggaaagaagttcctttgaaaaaaatccgattgactttttagaagctaaaggatataaggaagttaaaaaagacttaatcattaaactacctaaatatagtctttttgagttagaaaacggtcgtaaacggatgctggctagtgccggagaattacaaaaaggaaatgagctggctctgccaagcaaatatgtgaattttttatatttagctagtcattatgaaaagttgaagggtagtccagaagataacgaacaaaaacaattgtttgtggagcagcataagcattatttagatgagattattgagcaaatcagtgaattttctaagcgtgttattttagcagatgccaatttagataaagttcttagtgcatataacaaacatagagacaaaccaatacgtgaacaagcagaaaatattattcatttatttacgttgacgaatcttggagctcccgctgcttttaaatattttgatacaacaattgatcgtaaacgatatacgtctacaaaagaagttttagatgccactcttatccatcaatccatcactggtctttatgaaacacgcattgatttgagtcagctaggaggtgactga

SEQ ID NO: 199 - protein, 1367 aa, Streptococcus pyogenes
  REGION 1..1367: note = MISC_FEATURE - spCas9 polypeptide sequence
MDKKYSIGLDIGTNSVGWAVITDDYKVPSKKFKVLGNTDRHSIKKNLIGALLFGSGETAEATRLKRTARRRYTRRKNRICYLQEIFSNEMAKVDDSFFHRLEESFLVEEDKKHERHPIFGNIVDEVAYHEKYPTIYHLRKKLADSTDKADLRLIYLALAHMIKFRGHFLIEGDLNPDNSDVDKLFIQLVQIYNQLFEENPINASRVDAKAILSARLSKSRRLENLIAQLPGEKRNGLFGNLIALSLGLTPNFKSNFDLAEDAKLQLSKDTYDDDLDNLLAQIGDQYADLFLAAKNLSDAILLSDILRVNSEITKAPLSASMIKRYDEHHQDLTLLKALVRQQLPEKYKEIFFDQSKNGYAGYIDGGASQEEFYKFIKPILEKMDGTEELLVKLNREDLLRKQRTFDNGSIPHQIHLGELHAILRRQEDFYPFLKDNREKIEKILTFRIPYYVGPLARGNSRFAWMTRKSEETITPWNFEEVVDKGASAQSFIERMTNFDKNLPNEKVLPKHSLLYEYFTVYNELTKVKYVTEGMRKPAFLSGEQKKAIVDLLFKTNRKVTVKQLKEDYFKKIECFDSVEISGVEDRFNASLGAYHDLLKIIKDKDFLDNEENEDILEDIVLTLTLFEDRGMIEERLKTYAHLFDDKVMKQLKRRRYTGWGRLSRKLINGIRDKQSGKTILDFLKSDGFANRNFMQLIHDDSLTFKEDIQKAQVSGQGHSLHEQIANLAGSPAIKKGILQTVKIVDELVKVMGHKPENIVIEMARENQTTQKGQKNSRERMKRIEEGIKELGSQILKEHPVENTQLQNEKLYLYYLQNGRDMYVDQELDINRLSDYDVDHIVPQSFIKDDSIDNKVLTRSDKNRGKSDNVPSEEVVKKMKNYWRQLLNAKLITQRKFDNLTKAERGGLSELDKAGFIKRQLVETRQITKHVAQILDSRMNTKYDENDKLIREVKVITLKSKLVSDFRKDFQFYKVREINNYHHAHDAYLNAVVGTALIKKYPKLESEFVYGDYKVYDVRKMIAKSEQEIGKATAKYFFYSNIMNFFKTEITLANGEIRKRPLIETNGETGEIVWDKGRDFATVRKVLSMPQVNIVKKTEVQTGGFSKESILPKRNSDKLIARKKDWDPKKYGGFDSPTVAYSVLVVAKVEKGKSKKLKSVKELLGITIMERSSFEKNPIDFLEAKGYKEVKKDLIIKLPKYSLFELENGRKRMLASAGELQKGNELALPSKYVNFLYLASHYEKLKGSPEDNEQKQLFVEQHKHYLDEIIEQISEFSKRVILADANLDKVLSAYNKHRDKPIREQAENIIHLFTLTNLGAPAAFKYFDTTIDRKRYTSTKEVLDATLIHQSITGLYETRIDLSQLGGD

SEQ ID NO: 200 - DNA, 4212 bp, synthetic construct
  misc_feature 1..4212: note = wild-type Cas9 polynucleotide sequence
  misc_feature 5..58: note = RuvC domain
  misc_feature 718..764: note = RuvC domain
  misc_feature 772..901: note = HNH domain
  misc_feature 906..1101: note = RuvC domain
  source 1..4212: mol_type = other DNA
atggataaaaagtattctattggtttagacatcggcactaattccgttggatgggctgtcataaccgatgaatacaaagtaccttcaaagaaatttaaggtgttggggaacacagaccgtcattcgattaaaaagaatcttatcggtgccctcctattcgatagtggcgaaacggcagaggcgactcgcctgaaacgaaccgctcggagaaggtatacacgtcgcaagaaccgaatatgttacttacaagaaatttttagcaatgagatggccaaagttgacgattctttctttcaccgtttggaagagtccttccttgtcgaagaggacaagaaacatgaacggcaccccatctttggaaacatagtagatgaggtggcatatcatgaaaagtacccaacgatttatcacctcagaaaaaagctagttgactcaactgataaagcggacctgaggttaatctacttggctcttgcccatatgataaagttccgtgggcactttctcattgagggtgatctaaatccggacaactcggatgtcgacaaactgttcatccagttagtacaaacctataatcagttgtttgaagagaaccctataaatgcaagtggcgtggatgcgaaggctattcttagcgcccgcctctctaaatcccgacggctagaaaacctgatcgcacaattacccggagagaagaaaaatgggttgttcggtaaccttatagcgctctcactaggcctgacaccaaattttaagtcgaacttcgacttagctgaagatgccaaattgcagcttagtaaggacacgtacgatgacgatctcgacaatctactggcacaaattggagatcagtatgcggacttatttttggctgccaaaaaccttagcgatgcaatcctcctatctgacatactgagagttaatactgagattaccaaggcgccgttatccgcttcaatgatcaaaaggtacgatgaacatcaccaagacttgacacttctcaaggccctagtccgtcagcaactgcctgagaaatataaggaaatattctttgatcagtcgaaaaacgggtacgcaggttatattgacggcggagcgagtcaagaggaattctacaagtttatcaaacccatattagagaagatggatgggacggaagagttgcttgtaaaactcaatcgcgaagatctactgcgaaagcagcggactttcgacaacggtagcattccacatcaaatccacttaggcgaattgcatgctatacttagaaggcaggaggatttttatccgttcctcaaagacaatcgtgaaaagattgagaaaatcctaacctttcgcataccttactatgtgggacccctggcccgagggaactctcggttcgcatggatgacaagaaagtccgaagaaacgattactccatggaattttgaggaagttgtcgataaaggtgcgtcagctcaatcgttcatcgagaggatgaccaactttgacaagaatttaccgaacgaaaaagtattgcctaagcacagtttactttacgagtatttcacagtgtacaatgaactcacgaaagttaagtatgtcactgagggcatgcgtaaacccgcctttctaagcggagaacagaagaaagcaatagtagatctgttattcaagaccaaccgcaaagtgacagttaagcaattgaaagaggactactttaagaaaattgaatgcttcgattctgtcgagatctccggggtagaagatcgatttaatgcgtcacttggtacgtatcatgacctcctaaagataattaaagataaggacttcctggataacgaagagaatgaagatatcttagaagatatagtgttgactcttaccctctttgaagatcgggaaatgattgaggaaagactaaaaacatacgctcacctgttcgacgataaggttatgaaacagttaaagaggcgtcgctatacgggctggggacgattgtcgcggaaacttatcaacgggataagagacaagcaaagtggtaaaactattctcgattttctaaagagcgacggcttcgccaataggaactttatgcagctgatccatgatgactctttaaccttcaaagaggatatacaaaaggcacaggtttccggacaaggggactcattgcacgaacatattgcgaatcttgctggttcgccagccatcaaaaagggcatactccagacagtcaaagtagtggatgagctagttaaggtcatgggacgtcacaaaccggaaaacattgtaatcgagatggcacgcgaaaatcaaacgactcagaaggggcaaaaaaacagtcgagagcggatgaagagaatagaagagggtattaaagaactgggcagccagatcttaaaggagcatcctgtggaaaatacccaattgcagaacgagaaactttacctctattacctacaaaatggaagggacatgtatgttgatcaggaactggacataaaccgtttatctgattacgacgtcgatcacattgtaccccaatcctttttgaaggacgattcaatcgacaataaagtgcttacacgctcggataagaaccgagggaaaagtgacaatgttccaagcgaggaagtcgtaaagaaaatgaagaactattggcggcagctcctaaatgcgaaactgataacgcaaagaaagttcgataacttaactaaagctgagaggggtggcttgtctgaacttgacaaggccggatttattaaacgtcagctcgtggaaacccgccaaatcacaaagcatgttgcacagatactagattcccgaatgaatacgaaatacgacgagaacgataagctgattcgggaagtcaaagtaatcactttaaagtcaaaattggtgtcggacttcagaaaggattttcaattctataaagttagggagataaataactaccaccatgcgcacgacgcttatcttaatgccgtcgtagggaccgcactcattaagaaatacccgaagctagaaagtgagtttgtgtatggtgattacaaagtttatgacgtccgtaagatgatcgcgaaaagcgaacaggagataggcaaggctacagccaaatacttcttttattctaacattatgaatttctttaagacggaaatcactctggcaaacggagagatacgcaaacgacctttaattgaaaccaatggggagacaggtgaaatcgtatgggataagggccgggacttcgcgacggtgagaaaagttttgtccatgccccaagtcaacatagtaaagaaaactgaggtgcagaccggagggttttcaaaggaatcgattcttccaaaaaggaatagtgataagctcatcgctcgtaaaaaggactgggacccgaaaaagtacggtggcttcgatagccctacagttgcctattctgtcctagtagtggcaaaagttgagaagggaaaatccaagaaactgaagtcagtcaaagaattattggggataacgattatggagcgctcgtcttttgaaaagaaccccatcgacttccttgaggcgaaaggttacaaggaagtaaaaaaggatctcataattaaactaccaaagtatagtctgtttgagttagaaaatggccgaaaacggatgttggctagcgccggagagcttcaaaaggggaacgaactcgcactaccgtctaaatacgtgaatttcctgtatttagcgtcccattacgagaagttgaaaggttcacctgaagataacgaacagaagcaactttttgttgagcagcacaaacattatctcgacgaaatcatagagcaaatttcggaattcagtaagagagtcatcctagctgatgccaatctggacaaagtattaagcgcatacaacaagcacagggataaacccatacgtgagcaggcggaaaatattatccatttgtttactcttaccaacctcggcgctccagccgcattcaagtattttgacacaacgatagatcgcaaacgatacacttctaccaaggaggtgctagacgcgacactgattcaccaatccatcacgggattatatgaaactcggatagatttgtcacagcttgggggtgacggatcccccaagaagaagaggaaagtctcgagcgactacaaagaccatgacggtgattataaagatcatgacatcgattacaaggatgacgatgacaaggctgcagga

SEQ ID NO: 201 - protein, 1368 aa, synthetic construct
  REGION 1..1368: note = exemplary catalytically active Cas9 nickase (nCas9) polypeptide sequence
MDKKYSIGLAIGTNSVGWAVITDEYKVPSKKFKVLGNTDRHSIKKNLIGALLFDSGETAEATRLKRTARRRYTRRKNRICYLQEIFSNEMAKVDDSFFHRLEESFLVEEDKKHERHPIFGNIVDEVAYHEKYPTIYHLRKKLVDSTDKADLRLIYLALAHMIKFRGHFLIEGDLNPDNSDVDKLFIQLVQTYNQLFEENPINASGVDAKAILSARLSKSRRLENLIAQLPGEKKNGLFGNLIALSLGLTPNFKSNFDLAEDAKLQLSKDTYDDDLDNLLAQIGDQYADLFLAAKNLSDAILLSDILRVNTEITKAPLSASMIKRYDEHHQDLTLLKALVRQQLPEKYKEIFFDQSKNGYAGYIDGGASQEEFYKFIKPILEKMDGTEELLVKLNREDLLRKQRTFDNGSIPHQIHLGELHAILRRQEDFYPFLKDNREKIEKILTFRIPYYVGPLARGNSRFAWMTRKSEETITPWNFEEVVDKGASAQSFIERMTNFDKNLPNEKVLPKHSLLYEYFTVYNELTKVKYVTEGMRKPAFLSGEQKKAIVDLLFKTNRKVTVKQLKEDYFKKIECFDSVEISGVEDRFNASLGTYHDLLKIIKDKDFLDNEENEDILEDIVLTLTLFEDREMIEERLKTYAHLFDDKVMKQLKRRRYTGWGRLSRKLINGIRDKQSGKTILDFLKSDGFANRNFMQLIHDDSLTFKEDIQKAQVSGQGDSLHEHIANLAGSPAIKKGILQTVKVVDELVKVMGRHKPENIVIEMARENQTTQKGQKNSRERMKRIEEGIKELGSQILKEHPVENTQLQNEKLYLYYLQNGRDMYVDQELDINRLSDYDVDHIVPQSFLKDDSIDNKVLTRSDKNRGKSDNVPSEEVVKKMKNYWRQLLNAKLITQRKFDNLTKAERGGLSELDKAGFIKRQLVETRQITKHVAQILDSRMNTKYDENDKLIREVKVITLKSKLVSDFRKDFQFYKVREINNYHHAHDAYLNAVVGTALIKKYPKLESEFVYGDYKVYDVRKMIAKSEQEIGKATAKYFFYSNIMNFFKTEITLANGEIRKRPLIETNGETGEIVWDKGRDFATVRKVLSMPQVNIVKKTEVQTGGFSKESILPKRNSDKLIARKKDWDPKKYGGFDSPTVAYSVLVVAKVEKGKSKKLKSVKELLGITIMERSSFEKNPIDFLEAKGYKEVKKDLIIKLPKYSLFELENGRKRMLASAGELQKGNELALPSKYVNFLYLASHYEKLKGSPEDNEQKQLFVEQHKHYLDEIIEQISEFSKRVILADANLDKVLSAYNKHRDKPIREQAENIIHLFTLTNLGAPAAFKYFDTTIDRKRYTSTKEVLDATLIHQSITGLYETRIDLSQLGGD

SEQ ID NO: 202 - DNA, 4107 bp, Streptococcus pyogenes
  misc_feature 1..4107: note = Cas9 from Streptococcus pyogenes (NCBI Ref. Seq.: NC_002737.2)polynucleotide sequence
  source 1..4107: mol_type = genomic DNA
atggataagaaatactcaataggcttagatatcggcacaaatagcgtcggatgggcggtgatcactgatgaatataaggttccgtctaaaaagttcaaggttctgggaaatacagaccgccacagtatcaaaaaaaatcttataggggctcttttatttgacagtggagagacagcggaagcgactcgtctcaaacggacagctcgtagaaggtatacacgtcggaagaatcgtatttgttatctacaggagattttttcaaatgagatggcgaaagtagatgatagtttctttcatcgacttgaagagtcttttttggtggaagaagacaagaagcatgaacgtcatcctatttttggaaatatagtagatgaagttgcttatcatgagaaatatccaactatctatcatctgcgaaaaaaattggtagattctactgataaagcggatttgcgcttaatctatttggccttagcgcatatgattaagtttcgtggtcattttttgattgagggagatttaaatcctgataatagtgatgtggacaaactatttatccagttggtacaaacctacaatcaattatttgaagaaaaccctattaacgcaagtggagtagatgctaaagcgattctttctgcacgattgagtaaatcaagacgattagaaaatctcattgctcagctccccggtgagaagaaaaatggcttatttgggaatctcattgctttgtcattgggtttgacccctaattttaaatcaaattttgatttggcagaagatgctaaattacagctttcaaaagatacttacgatgatgatttagataatttattggcgcaaattggagatcaatatgctgatttgtttttggcagctaagaatttatcagatgctattttactttcagatatcctaagagtaaatactgaaataactaaggctcccctatcagcttcaatgattaaacgctacgatgaacatcatcaagacttgactcttttaaaagctttagttcgacaacaacttccagaaaagtataaagaaatcttttttgatcaatcaaaaaacggatatgcaggttatattgatgggggagctagccaagaagaattttataaatttatcaaaccaattttagaaaaaatggatggtactgaggaattattggtgaaactaaatcgtgaagatttgctgcgcaagcaacggacctttgacaacggctctattccccatcaaattcacttgggtgagctgcatgctattttgagaagacaagaagacttttatccatttttaaaagacaatcgtgagaagattgaaaaaatcttgacttttcgaattccttattatgttggtccattggcgcgtggcaatagtcgttttgcatggatgactcggaagtctgaagaaacaattaccccatggaattttgaagaagttgtcgataaaggtgcttcagctcaatcatttattgaacgcatgacaaactttgataaaaatcttccaaatgaaaaagtactaccaaaacatagtttgctttatgagtattttacggtttataacgaattgacaaaggtcaaatatgttactgaaggaatgcgaaaaccagcatttctttcaggtgaacagaagaaagccattgttgatttactcttcaaaacaaatcgaaaagtaaccgttaagcaattaaaagaagattatttcaaaaaaatagaatgttttgatagtgttgaaatttcaggagttgaagatagatttaatgcttcattaggtacctaccatgatttgctaaaaattattaaagataaagattttttggataatgaagaaaatgaagatatcttagaggatattgttttaacattgaccttatttgaagatagggagatgattgaggaaagacttaaaacatatgctcacctctttgatgataaggtgatgaaacagcttaaacgtcgccgttatactggttggggacgtttgtctcgaaaattgattaatggtattagggataagcaatctggcaaaacaatattagattttttgaaatcagatggttttgccaatcgcaattttatgcagctgatccatgatgatagtttgacatttaaagaagacattcaaaaagcacaagtgtctggacaaggcgatagtttacatgaacatattgcaaatttagctggtagccctgctattaaaaaaggtattttacagactgtaaaagttgttgatgaattggtcaaagtaatggggcggcataagccagaaaatatcgttattgaaatggcacgtgaaaatcagacaactcaaaagggccagaaaaattcgcgagagcgtatgaaacgaatcgaagaaggtatcaaagaattaggaagtcagattcttaaagagcatcctgttgaaaatactcaattgcaaaatgaaaagctctatctctattatctccaaaatggaagagacatgtatgtggaccaagaattagatattaatcgtttaagtgattatgatgtcgatcacattgttccacaaagtttccttaaagacgattcaatagacaataaggtcttaacgcgttctgataaaaatcgtggtaaatcggataacgttccaagtgaagaagtagtcaaaaagatgaaaaactattggagacaacttctaaacgccaagttaatcactcaacgtaagtttgataatttaacgaaagctgaacgtggaggtttgagtgaacttgataaagctggttttatcaaacgccaattggttgaaactcgccaaatcactaagcatgtggcacaaattttggatagtcgcatgaatactaaatacgatgaaaatgataaacttattcgagaggttaaagtgattaccttaaaatctaaattagtttctgacttccgaaaagatttccaattctataaagtacgtgagattaacaattaccatcatgcccatgatgcgtatctaaatgccgtcgttggaactgctttgattaagaaatatccaaaacttgaatcggagtttgtctatggtgattataaagtttatgatgttcgtaaaatgattgctaagtctgagcaagaaataggcaaagcaaccgcaaaatatttcttttactctaatatcatgaacttcttcaaaacagaaattacacttgcaaatggagagattcgcaaacgccctctaatcgaaactaatggggaaactggagaaattgtctgggataaagggcgagattttgccacagtgcgcaaagtattgtccatgccccaagtcaatattgtcaagaaaacagaagtacagacaggcggattctccaaggagtcaattttaccaaaaagaaattcggacaagcttattgctcgtaaaaaagactgggatccaaaaaaatatggtggttttgatagtccaacggtagcttattcagtcctagtggttgctaaggtggaaaaagggaaatcgaagaagttaaaatccgttaaagagttactagggatcacaattatggaaagaagttcctttgaaaaaaatccgattgactttttagaagctaaaggatataaggaagttaaaaaagacttaatcattaaactacctaaatatagtctttttgagttagaaaacggtcgtaaacggatgctggctagtgccggagaattacaaaaaggaaatgagctggctctgccaagcaaatatgtgaattttttatatttagctagtcattatgaaaagttgaagggtagtccagaagataacgaacaaaaacaattgtttgtggagcagcataagcattatttagatgagattattgagcaaatcagtgaattttctaagcgtgttattttagcagatgccaatttagataaagttcttagtgcatataacaaacatagagacaaaccaatacgtgaacaagcagaaaatattattcatttatttacgttgacgaatcttggagctcccgctgcttttaaatattttgatacaacaattgatcgtaaacgatatacgtctacaaaagaagttttagatgccactcttatccatcaatccatcactggtctttatgaaacacgcattgatttgagtcagctaggaggtgactga

SEQ ID NO: 203 - protein, 1368 aa, synthetic construct
  REGION 1..1368: note = catalytically inactive Cas9 (dCas9)polypeptide sequence
  REGION 5..58: note = MISC_FEATURE - RuvC domain
  REGION 718..764: note = MISC_FEATURE - RuvC domain
  REGION 773..902: note = MISC_FEATURE - HNH domain
  REGION 907..1102: note = MISC_FEATURE - RuvC domain
MDKKYSIGLAIGTNSVGWAVITDEYKVPSKKFKVLGNTDRHSIKKNLIGALLFDSGETAEATRLKRTARRRYTRRKNRICYLQEIFSNEMAKVDDSFFHRLEESFLVEEDKKHERHPIFGNIVDEVAYHEKYPTIYHLRKKLVDSTDKADLRLIYLALAHMIKFRGHFLIEGDLNPDNSDVDKLFIQLVQTYNQLFEENPINASGVDAKAILSARLSKSRRLENLIAQLPGEKKNGLFGNLIALSLGLTPNFKSNFDLAEDAKLQLSKDTYDDDLDNLLAQIGDQYADLFLAAKNLSDAILLSDILRVNTEITKAPLSASMIKRYDEHHQDLTLLKALVRQQLPEKYKEIFFDQSKNGYAGYIDGGASQEEFYKFIKPILEKMDGTEELLVKLNREDLLRKQRTFDNGSIPHQIHLGELHAILRRQEDFYPFLKDNREKIEKILTFRIPYYVGPLARGNSRFAWMTRKSEETITPWNFEEVVDKGASAQSFIERMTNFDKNLPNEKVLPKHSLLYEYFTVYNELTKVKYVTEGMRKPAFLSGEQKKAIVDLLFKTNRKVTVKQLKEDYFKKIECFDSVEISGVEDRFNASLGTYHDLLKIIKDKDFLDNEENEDILEDIVLTLTLFEDREMIEERLKTYAHLFDDKVMKQLKRRRYTGWGRLSRKLINGIRDKQSGKTILDFLKSDGFANRNFMQLIHDDSLTFKEDIQKAQVSGQGDSLHEHIANLAGSPAIKKGILQTVKVVDELVKVMGRHKPENIVIEMARENQTTQKGQKNSRERMKRIEEGIKELGSQILKEHPVENTQLQNEKLYLYYLQNGRDMYVDQELDINRLSDYDVDAIVPQSFLKDDSIDNKVLTRSDKNRGKSDNVPSEEVVKKMKNYWRQLLNAKLITQRKFDNLTKAERGGLSELDKAGFIKRQLVETRQITKHVAQILDSRMNTKYDENDKLIREVKVITLKSKLVSDFRKDFQFYKVREINNYHHAHDAYLNAVVGTALIKKYPKLESEFVYGDYKVYDVRKMIAKSEQEIGKATAKYFFYSNIMNFFKTEITLANGEIRKRPLIETNGETGEIVWDKGRDFATVRKVLSMPQVNIVKKTEVQTGGFSKESILPKRNSDKLIARKKDWDPKKYGGFDSPTVAYSVLVVAKVEKGKSKKLKSVKELLGITIMERSSFEKNPIDFLEAKGYKEVKKDLIIKLPKYSLFELENGRKRMLASAGELQKGNELALPSKYVNFLYLASHYEKLKGSPEDNEQKQLFVEQHKHYLDEIIEQISEFSKRVILADANLDKVLSAYNKHRDKPIREQAENIIHLFTLTNLGAPAAFKYFDTTIDRKRYTSTKEVLDATLIHQSITGLYETRIDLSQLGGD

SEQ ID NO: 204 - protein, 345 aa, Sulfolobus islandicus
  REGION 1..345: note = MISC_FEATURE - tr|F0NN87|F0NN87_SULIHCRISPR-associatedCasx protein OS =Sulfolobus islandicus (strain HVE10/4) GN = SiH_0402 PE=4; SV = 1);CasX polypeptide sequence
MEVPLYNIFGDNYIIQVATEAENSTIYNNKVEIDDEELRNVLNLAYKIAKNNEDAAAERRGKAKKKKGEEGETTTSNIILPLSGNDKNPWTETLKCYNFPTTVALSEVFKNFSQVKECEEVSAPSFVKPEFYEFGRSPGMVERTRRVKLEVEPHYLIIAAAGWVLTRLGKAKVSEGDYVGVNVFTPTRGILYSLIQNVNGIVPGIKPETAFGLWIARKVVSSVTNPNVSVVRIYTISDAVGQNPTTINGGFSIDLTKLLEKRYLLSERLEAIARNALSISSNMRERYIVLANYIYEYLTGSKRLEDLLYFANRDLIMNLNSDDGKVRDLKLISAYVNGELIRGEG

SEQ ID NO: 205 - protein, 345 aa, Sulfolobus islandicus
  REGION 1..345: note = MISC_FEATURE - tr|F0NH53|F0NH53_SULIR CRISPR associated protein, Casx OS =Sulfolobus islandicus (strain REY15A) GN=SiRe_0771 PE=4 SV=1);CasX polypeptide sequence
MEVPLYNIFGDNYIIQVATEAENSTIYNNKVEIDDEELRNVLNLAYKIAKNNEDAAAERRGKAKKKKGEEGETTTSNIILPLSGNDKNPWTETLKCYNFPTTVALSEVFKNFSQVKECEEVSAPSFVKPEFYKFGRSPGMVERTRRVKLEVEPHYLIMAAAGWVLTRLGKAKVSEGDYVGVNVFTPTRGILYSLIQNVNGIVPGIKPETAFGLWIARKVVSSVTNPNVSVVSIYTISDAVGQNPTTINGGFSIDLTKLLEKRDLLSERLEAIARNALSISSNMRERYIVLANYIYEYLTGSKRLEDLLYFANRDLIMNLNSDDGKVRDLKLISAYVNGELIRGEG

SEQ ID NO: 206 - protein, 987 aa, unidentified
  REGION 1..987: note = MISC_FEATURE - CasX polypeptide sequence
MEKRINKIRKKLSADNATKPVSRSGPMKTLLVRVMTDDLKKRLEKRRKKPEVMPQVISNNAANNLRMLLDDYTKMKEAILQVYWQEFKDDHVGLMCKFAQPASKKIDQNKLKPEMDEKGNLTTAGFACSQCGQPLFVYKLEQVSEKGKAYTNYFGRCNVAEHEKLILLAQLKPVKDSDEAVTYSLGKFGQRALDFYSIHVTKESTHPVKPLAQIAGNRYASGPVGKALSDACMGTIASFLSKYQDIIIEHQKVVKGNQKRLESLRELAGKENLEYPSVTLPPQPHTKEGVDFAYNEVIARVRMWVNLNLWQKLKLSRDDAKPLLRLKGFPSFPVVERRENEVDWWNTINEVKKLIDAKRDMGRVFWSGVTAEKRNTILEGYNYLPNENDHKKREGSLENPKKPAKRQFGDLLLYLEKKYAGDWGKVFDEAWERIDKKIAGLTSHIEREEARNAEDAQSKAVLTDWLRAKASFVLERLKEMDEKEFYACEIQLQKWYGDLRGNPFAVEAENRVVDISGFSIGSDGHSIQYRNLLAWKYLENGKREFYLLMNYGKKGRIRFTDGTDIKKSGKWQGLLYGGGKAKVIDLTFDPDDEQLIILPLAFGTRQGREFIWNDLLSLETGLIKLANGRVIEKTIYNKKIGRDEPALFVALTFERREVVDPSNIKPVNLIGVARGENIPAVIALTDPEGCPLPEFKDSSGGPTDILRIGEGYKEKQRAIQAAKEVEQRRAGGYSRKFASKSRNLADDMVRNSARDLFYHAVTHDAVLVFANLSRGFGRQGKRTFMTERQYTKMEDWLTAKLAYEGLTSKTYLSKTLAQYTSKTCSNCGFTITYADMDVMLVRLKKTSDGWATTLNNKELKAEYQITYYNRYKRQTVEKELSAELDRLSEESGNNDISKWTKGRRDEALFLLKKRFSHRPVQEQFVCLDCGHEVHAAEQAALNIARSWLFLNSNSTEFKSYKSGKQPFVGAWQAFYKRRLKEVWKPNA

SEQ ID NO: 207 - protein, 1210 aa, unidentified
  REGION 1..1210: note = MISC_FEATURE - APG80656.1 CRISPR-associated protein CasY [uncultured Parcubacteria group bacterium]; CasY polypeptide sequence
MSKRHPRISGVKGYRLHAQRLEYTGKSGAMRTIKYPLYSSPSGGRTVPREIVSAINDDYVGLYGLSNFDDLYNAEKRNEEKVYSVLDFWYDCVQYGAVFSYTAPGLLKNVAEVRGGSYELTKTLKGSHLYDELQIDKVIKFLNKKEISRANGSLDKLKKDIIDCFKAEYRERHKDQCNKLADDIKNAKKDAGASLGERQKKLFRDFFGISEQSENDKPSFTNPLNLTCCLLPFDTVNNNRNRGEVLFNKLKEYAQKLDKNEGSLEMWEYIGIGNSGTAFSNFLGEGFLGRLRENKITELKKAMMDITDAWRGQEQEEELEKRLRILAALTIKLREPKFDNHWGGYRSDINGKLSSWLQNYINQTVKIKEDLKGHKKDLKKAKEMINRFGESDTKEEAVVSSLLESIEKIVPDDSADDEKPDIPAIAIYRRFLSDGRLTLNRFVQREDVQEALIKERLEAEKKKKPKKRKKKSDAEDEKETIDFKELFPHLAKPLKLVPNFYGDSKRELYKKYKNAAIYTDALWKAVEKIYKSAFSSSLKNSFFDTDFDKDFFIKRLQKIFSVYRRFNTDKWKPIVKNSFAPYCDIVSLAENEVLYKPKQSRSRKSAAIDKNRVRLPSTENIAKAGIALARELSVAGFDWKDLLKKEEHEEYIDLIELHKTALALLLAVTETQLDISALDFVENGTVKDFMKTRDGNLVLEGRFLEMFSQSIVFSELRGLAGLMSRKEFITRSAIQTMNGKQAELLYIPHEFQSAKITTPKEMSRAFLDLAPAEFATSLEPESLSEKSLLKLKQMRYYPHYFGYELTRTGQGIDGGVAENALRLEKSPVKKREIKCKQYKTLGRGQNKIVLYVRSSYYQTQFLEWFLHRPKNVQTDVAVSGSFLIDEKKVKTRWNYDALTVALEPVSGSERVFVSQPFTIFPEKSAEEEGQRYLGIDIGEYGIAYTALEITGDSAKILDQNFISDPQLKTLREEVKGLKLDQRRGTFAMPSTKIARIRESLVHSLRNRIHHLALKHKAKIVYELEVSRFEEGKQKIKKVYATLKKADVYSEIDADKNLQTTVWGKLAVASEISASYTSQFCGACKKLWRAEMQVDETITTQELIGTVRVIKGGTLIDAIKDFMRPPIFDENDTPFPKYRDFCDKHHISKKMRGNSCLFICPFCRANADADIQASQTIALLRYVKEEKKVEDYFERFRKLKNIKVLGQMKKI

SEQ ID NO: 208 - protein, 1082 aa, Neisseria meningitidis
  REGION 1..1082: note = MISC_FEATURE - NCBI Reference: WP_002235162.1; type II CRISPR RNA-guided endonuclease Cas9; Nme1Cas9 polypeptide sequence
MAAFKPNPINYILGLDIGIASVGWAMVEIDEDENPICLIDLGVRVFERAEVPKTGDSLAMARRLARSVRRLTRRRAHRLLRARRLLKREGVLQAADFDENGLIKSLPNTPWQLRAAALDRKLTPLEWSAVLLHLIKHRGYLSQRKNEGETADKELGALLKGVADNAHALQTGDFRTPAELALNKFEKESGHIRNQRGDYSHTFSRKDLQAELILLFEKQKEFGNPHVSGGLKEGIETLLMTQRPALSGDAVQKMLGHCTFEPAEPKAAKNTYTAERFIWLTKLNNLRILEQGSERPLTDTERATLMDEPYRKSKLTYAQARKLLGLEDTAFFKGLRYGKDNAEASTLMEMKAYHAISRALEKEGLKDKKSPLNLSPELQDEIGTAFSLFKTDEDITGRLKDRIQPEILEALLKHISFDKFVQISLKALRRIVPLMEQGKRYDEACAEIYGDHYGKKNTEEKIYLPPIPADEIRNPVVLRALSQARKVINGVVRRYGSPARIHIETAREVGKSFKDRKEIEKRQEENRKDREKAAAKFREYFPNFVGEPKSKDILKLRLYEQQHGKCLYSGKEINLGRLNEKGYVEIDHALPFSRTWDDSFNNKVLVLGSENQNKGNQTPYEYFNGKDNSREWQEFKARVETSRFPRSKKQRILLQKFDEDGFKERNLNDTRYVNRFLCQFVADRMRLTGKGKKRVFASNGQITNLLRGFWGLRKVRAENDRHHALDAVVVACSTVAMQQKITRFVRYKEMNAFDGKTIDKETGEVLHQKTHFPQPWEFFAQEVMIRVFGKPDGKPEFEEADTPEKLRTLLAEKLSSRPEAVHEYVTPLFVSRAPNRKMSGQGHMETVKSAKRLDEGVSVLRVPLTQLKLKDLEKMVNREREPKLYEALKARLEAHKDDPAKAFAEPFYKYDKAGNRTQQVKAVRVEQVQKTGVWVRNHNGIADNATMVRVDVFEKGDKYYLVPIYSWQVAKGILPDRAVVQGKDEEDWQLIDDSFNFKFSLHPNDLVEVITKKARMFGYFASCHRGTGNINIRIHDLDHKIGKNGILEGIGVKTALSFQKYQIDELGKEIRPCRLKKRPPVR

SEQ ID NO: 209 - protein, 1082 aa, Neisseria meningitidis
  REGION 1..1082: note = MISC_FEATURE - NCBI Reference: WP_002230835; type II CRISPR RNA-guided endonuclease Cas9; Nme2Cas9 polypeptide sequence
MAAFKPNPINYILGLDIGIASVGWAMVEIDEEENPIRLIDLGVRVFERAEVPKTGDSLAMARRLARSVRRLTRRRAHRLLRARRLLKREGVLQAADFDENGLIKSLPNTPWQLRAAALDRKLTPLEWSAVLLHLIKHRGYLSQRKNEGETADKELGALLKGVANNAHALQTGDFRTPAELALNKFEKESGHIRNQRGDYSHTFSRKDLQAELILLFEKQKEFGNPHVSGGLKEGIETLLMTQRPALSGDAVQKMLGHCTFEPAEPKAAKNTYTAERFIWLTKLNNLRILEQGSERPLTDTERATLMDEPYRKSKLTYAQARKLLGLEDTAFFKGLRYGKDNAEASTLMEMKAYHAISRALEKEGLKDKKSPLNLSSELQDEIGTAFSLFKTDEDITGRLKDRVQPEILEALLKHISFDKFVQISLKALRRIVPLMEQGKRYDEACAEIYGDHYGKKNTEEKIYLPPIPADEIRNPVVLRALSQARKVINGVVRRYGSPARIHIETAREVGKSFKDRKEIEKRQEENRKDREKAAAKFREYFPNFVGEPKSKDILKLRLYEQQHGKCLYSGKEINLVRLNEKGYVEIDHALPFSRTWDDSFNNKVLVLGSENQNKGNQTPYEYFNGKDNSREWQEFKARVETSRFPRSKKQRILLQKFDEDGFKECNLNDTRYVNRFLCQFVADHILLTGKGKRRVFASNGQITNLLRGFWGLRKVRAENDRHHALDAVVVACSTVAMQQKITRFVRYKEMNAFDGKTIDKETGKVLHQKTHFPQPWEFFAQEVMIRVFGKPDGKPEFEEADTPEKLRTLLAEKLSSRPEAVHEYVTPLFVSRAPNRKMSGAHKDTLRSAKRFVKHNEKISVKRVWLTEIKLADLENMVNYKNGREIELYEALKARLEAYGGNAKQAFDPKDNPFYKKGGQLVKAVRVEKTQESGVLLNKKNAYTIADNGDMVRVDVFCKVDKKGKNQYFIVPIYAWQVAENILPDIDCKGYRIDDSYTFCFSLHKYDLIAFQKDEKSKVEFAYYINCDSSNGRFYLAWHDKGSKEQQFRISTQNLVLIQKYQVNELGKEIRPCRLKKRPPVR

SEQ ID NO: 210 - protein, 1300 aa, Francisella tularensis
  REGION 1..1300: note = MISC_FEATURE - wild type Cpf1 polypeptide sequence
  source 1..1300: note = subspecies novicida
MSIYQEFVNKYSLSKTLRFELIPQGKTLENIKARGLILDDEKRAKDYKKAKQIIDKYHQFFIEEILSSVCISEDLLQNYSDVYFKLKKSDDDNLQKDFKSAKDTIKKQISEYIKDSEKFKNLFNQNLIDAKKGQESDLILWLKQSKDNGIELFKANSDITDIDEALEIIKSFKGWTTYFKGFHENRKNVYSSNDIPTSIIYRIVDDNLPKFLENKAKYESLKDKAPEAINYEQIKKDLAEELTFDIDYKTSEVNQRVFSLDEVFEIANFNNYLNQSGITKFNTIIGGKFVNGENTKRKGINEYINLYSQQINDKTLKKYKMSVLFKQILSDTESKSFVIDKLEDDSDVVTTMQSFYEQIAAFKTVEEKSIKETLSLLFDDLKAQKLDLSKIYFKNDKSLTDLSQQVFDDYSVIGTAVLEYITQQIAPKNLDNPSKKEQELIAKKTEKAKYLSLETIKLALEEFNKHRDIDKQCRFEEILANFAAIPMIFDEIAQNKDNLAQISIKYQNQGKKDLLQASAEDDVKAIKDLLDQTNNLLHKLKIFHISQSEDKANILDKDEHFYLVFEECYFELANIVPLYNKIRNYITQKPYSDEKFKLNFENSTLANGWDKNKEPDNTAILFIKDDKYYLGVMNKKNNKIFDDKAIKENKGEGYKKIVYKLLPGANKMLPKVFFSAKSIKFYNPSEDILRIRNHSTHTKNGSPQKGYEKFEFNIEDCRKFIDFYKQSISKHPEWKDFGFRFSDTQRYNSIDEFYREVENQGYKLTFENISESYIDSVVNQGKLYLFQIYNKDFSAYSKGRPNLHTLYWKALFDERNLQDVVYKLNGEAELFYRKQSIPKKITHPAKEAIANKNKDNPKKESVFEYDLIKDKRFTEDKFFFHCPITINFKSSGANKFNDEINLLLKEKANDVHILSIDRGERHLAYYTLVDGKGNIIKQDTFNIIGNDRMKTNYHDKLAAIEKDRDSARKDWKKINNIKEMKEGYLSQVVHEIAKLVIEYNAIVVFEDLNFGFKRGRFKVEKQVYQKLEKMLIEKLNYLVFKDNEFDKTGGVLRAYQLTAPFETFKKMGKQTGIIYYVPAGFTSKICPVTGFVNQLYPKYESVSKSQEFFSKFDKICYNLDKGYFEFSFDYKNFGDKAAKGKWTIASFGSRLINFRNSDKNHNWDTREVYPTKELEKLLKDYSIEYGHGECIKAAICGESDKKFFAKLTSVLNTILQMRNSKTGTELDYLISPVADVNGNFFDSRQAPKNMPQDADANGAYHIGLKGLMLLGRIKNNQEGKKLNLVIKNEEYFEFVQNRNN

SEQ ID NO: 211 - protein, 1300 aa, Francisella tularensis
  REGION 1..1300: note = MISC_FEATURE - Cpf1 D917A polypeptide sequence
  source 1..1300: note = subspecies novicida
MSIYQEFVNKYSLSKTLRFELIPQGKTLENIKARGLILDDEKRAKDYKKAKQIIDKYHQFFIEEILSSVCISEDLLQNYSDVYFKLKKSDDDNLQKDFKSAKDTIKKQISEYIKDSEKFKNLFNQNLIDAKKGQESDLILWLKQSKDNGIELFKANSDITDIDEALEIIKSFKGWTTYFKGFHENRKNVYSSNDIPTSIIYRIVDDNLPKFLENKAKYESLKDKAPEAINYEQIKKDLAEELTFDIDYKTSEVNQRVFSLDEVFEIANFNNYLNQSGITKFNTIIGGKFVNGENTKRKGINEYINLYSQQINDKTLKKYKMSVLFKQILSDTESKSFVIDKLEDDSDVVTTMQSFYEQIAAFKTVEEKSIKETLSLLFDDLKAQKLDLSKIYFKNDKSLTDLSQQVFDDYSVIGTAVLEYITQQIAPKNLDNPSKKEQELIAKKTEKAKYLSLETIKLALEEFNKHRDIDKQCRFEEILANFAAIPMIFDEIAQNKDNLAQISIKYQNQGKKDLLQASAEDDVKAIKDLLDQTNNLLHKLKIFHISQSEDKANILDKDEHFYLVFEECYFELANIVPLYNKIRNYITQKPYSDEKFKLNFENSTLANGWDKNKEPDNTAILFIKDDKYYLGVMNKKNNKIFDDKAIKENKGEGYKKIVYKLLPGANKMLPKVFFSAKSIKFYNPSEDILRIRNHSTHTKNGSPQKGYEKFEFNIEDCRKFIDFYKQSISKHPEWKDFGFRFSDTQRYNSIDEFYREVENQGYKLTFENISESYIDSVVNQGKLYLFQIYNKDFSAYSKGRPNLHTLYWKALFDERNLQDVVYKLNGEAELFYRKQSIPKKITHPAKEAIANKNKDNPKKESVFEYDLIKDKRFTEDKFFFHCPITINFKSSGANKFNDEINLLLKEKANDVHILSIARGERHLAYYTLVDGKGNIIKQDTFNIIGNDRMKTNYHDKLAAIEKDRDSARKDWKKINNIKEMKEGYLSQVVHEIAKLVIEYNAIVVFEDLNFGFKRGRFKVEKQVYQKLEKMLIEKLNYLVFKDNEFDKTGGVLRAYQLTAPFETFKKMGKQTGIIYYVPAGFTSKICPVTGFVNQLYPKYESVSKSQEFFSKFDKICYNLDKGYFEFSFDYKNFGDKAAKGKWTIASFGSRLINFRNSDKNHNWDTREVYPTKELEKLLKDYSIEYGHGECIKAAICGESDKKFFAKLTSVLNTILQMRNSKTGTELDYLISPVADVNGNFFDSRQAPKNMPQDADANGAYHIGLKGLMLLGRIKNNQEGKKLNLVIKNEEYFEFVQNRNN

SEQ ID NO: 212 - protein, 1300 aa, Francisella tularensis
  REGION 1..1300: note = MISC_FEATURE - Cpf1 E1006A polypeptide sequence
  source 1..1300: note = subspecies novicida
MSIYQEFVNKYSLSKTLRFELIPQGKTLENIKARGLILDDEKRAKDYKKAKQIIDKYHQFFIEEILSSVCISEDLLQNYSDVYFKLKKSDDDNLQKDFKSAKDTIKKQISEYIKDSEKFKNLFNQNLIDAKKGQESDLILWLKQSKDNGIELFKANSDITDIDEALEIIKSFKGWTTYFKGFHENRKNVYSSNDIPTSIIYRIVDDNLPKFLENKAKYESLKDKAPEAINYEQIKKDLAEELTFDIDYKTSEVNQRVFSLDEVFEIANFNNYLNQSGITKFNTIIGGKFVNGENTKRKGINEYINLYSQQINDKTLKKYKMSVLFKQILSDTESKSFVIDKLEDDSDVVTTMQSFYEQIAAFKTVEEKSIKETLSLLFDDLKAQKLDLSKIYFKNDKSLTDLSQQVFDDYSVIGTAVLEYITQQIAPKNLDNPSKKEQELIAKKTEKAKYLSLETIKLALEEFNKHRDIDKQCRFEEILANFAAIPMIFDEIAQNKDNLAQISIKYQNQGKKDLLQASAEDDVKAIKDLLDQTNNLLHKLKIFHISQSEDKANILDKDEHFYLVFEECYFELANIVPLYNKIRNYITQKPYSDEKFKLNFENSTLANGWDKNKEPDNTAILFIKDDKYYLGVMNKKNNKIFDDKAIKENKGEGYKKIVYKLLPGANKMLPKVFFSAKSIKFYNPSEDILRIRNHSTHTKNGSPQKGYEKFEFNIEDCRKFIDFYKQSISKHPEWKDFGFRFSDTQRYNSIDEFYREVENQGYKLTFENISESYIDSVVNQGKLYLFQIYNKDFSAYSKGRPNLHTLYWKALFDERNLQDVVYKLNGEAELFYRKQSIPKKITHPAKEAIANKNKDNPKKESVFEYDLIKDKRFTEDKFFFHCPITINFKSSGANKFNDEINLLLKEKANDVHILSIDRGERHLAYYTLVDGKGNIIKQDTFNIIGNDRMKTNYHDKLAAIEKDRDSARKDWKKINNIKEMKEGYLSQVVHEIAKLVIEYNAIVVFADLNFGFKRGRFKVEKQVYQKLEKMLIEKLNYLVFKDNEFDKTGGVLRAYQLTAPFETFKKMGKQTGIIYYVPAGFTSKICPVTGFVNQLYPKYESVSKSQEFFSKFDKICYNLDKGYFEFSFDYKNFGDKAAKGKWTIASFGSRLINFRNSDKNHNWDTREVYPTKELEKLLKDYSIEYGHGECIKAAICGESDKKFFAKLTSVLNTILQMRNSKTGTELDYLISPVADVNGNFFDSRQAPKNMPQDADANGAYHIGLKGLMLLGRIKNNQEGKKLNLVIKNEEYFEFVQNRNN

SEQ ID NO: 213 - protein, 1300 aa, Francisella tularensis
  REGION 1..1300: note = MISC_FEATURE - Cpf1 D1255A polypeptide sequence
  source 1..1300: note = subspecies novicida
MSIYQEFVNKYSLSKTLRFELIPQGKTLENIKARGLILDDEKRAKDYKKAKQIIDKYHQFFIEEILSSVCISEDLLQNYSDVYFKLKKSDDDNLQKDFKSAKDTIKKQISEYIKDSEKFKNLFNQNLIDAKKGQESDLILWLKQSKDNGIELFKANSDITDIDEALEIIKSFKGWTTYFKGFHENRKNVYSSNDIPTSIIYRIVDDNLPKFLENKAKYESLKDKAPEAINYEQIKKDLAEELTFDIDYKTSEVNQRVFSLDEVFEIANFNNYLNQSGITKFNTIIGGKFVNGENTKRKGINEYINLYSQQINDKTLKKYKMSVLFKQILSDTESKSFVIDKLEDDSDVVTTMQSFYEQIAAFKTVEEKSIKETLSLLFDDLKAQKLDLSKIYFKNDKSLTDLSQQVFDDYSVIGTAVLEYITQQIAPKNLDNPSKKEQELIAKKTEKAKYLSLETIKLALEEFNKHRDIDKQCRFEEILANFAAIPMIFDEIAQNKDNLAQISIKYQNQGKKDLLQASAEDDVKAIKDLLDQTNNLLHKLKIFHISQSEDKANILDKDEHFYLVFEECYFELANIVPLYNKIRNYITQKPYSDEKFKLNFENSTLANGWDKNKEPDNTAILFIKDDKYYLGVMNKKNNKIFDDKAIKENKGEGYKKIVYKLLPGANKMLPKVFFSAKSIKFYNPSEDILRIRNHSTHTKNGSPQKGYEKFEFNIEDCRKFIDFYKQSISKHPEWKDFGFRFSDTQRYNSIDEFYREVENQGYKLTFENISESYIDSVVNQGKLYLFQIYNKDFSAYSKGRPNLHTLYWKALFDERNLQDVVYKLNGEAELFYRKQSIPKKITHPAKEAIANKNKDNPKKESVFEYDLIKDKRFTEDKFFFHCPITINFKSSGANKFNDEINLLLKEKANDVHILSIDRGERHLAYYTLVDGKGNIIKQDTFNIIGNDRMKTNYHDKLAAIEKDRDSARKDWKKINNIKEMKEGYLSQVVHEIAKLVIEYNAIVVFEDLNFGFKRGRFKVEKQVYQKLEKMLIEKLNYLVFKDNEFDKTGGVLRAYQLTAPFETFKKMGKQTGIIYYVPAGFTSKICPVTGFVNQLYPKYESVSKSQEFFSKFDKICYNLDKGYFEFSFDYKNFGDKAAKGKWTIASFGSRLINFRNSDKNHNWDTREVYPTKELEKLLKDYSIEYGHGECIKAAICGESDKKFFAKLTSVLNTILQMRNSKTGTELDYLISPVADVNGNFFDSRQAPKNMPQDAAANGAYHIGLKGLMLLGRIKNNQEGKKLNLVIKNEEYFEFVQNRNN

SEQ ID NO: 214 - protein, 1300 aa, Francisella tularensis
  REGION 1..1300: note = MISC_FEATURE - Cpf1 D917A/E1006A polypeptide sequence
  source 1..1300: note = subspecies novicida
MSIYQEFVNKYSLSKTLRFELIPQGKTLENIKARGLILDDEKRAKDYKKAKQIIDKYHQFFIEEILSSVCISEDLLQNYSDVYFKLKKSDDDNLQKDFKSAKDTIKKQISEYIKDSEKFKNLFNQNLIDAKKGQESDLILWLKQSKDNGIELFKANSDITDIDEALEIIKSFKGWTTYFKGFHENRKNVYSSNDIPTSIIYRIVDDNLPKFLENKAKYESLKDKAPEAINYEQIKKDLAEELTFDIDYKTSEVNQRVFSLDEVFEIANFNNYLNQSGITKFNTIIGGKFVNGENTKRKGINEYINLYSQQINDKTLKKYKMSVLFKQILSDTESKSFVIDKLEDDSDVVTTMQSFYEQIAAFKTVEEKSIKETLSLLFDDLKAQKLDLSKIYFKNDKSLTDLSQQVFDDYSVIGTAVLEYITQQIAPKNLDNPSKKEQELIAKKTEKAKYLSLETIKLALEEFNKHRDIDKQCRFEEILANFAAIPMIFDEIAQNKDNLAQISIKYQNQGKKDLLQASAEDDVKAIKDLLDQTNNLLHKLKIFHISQSEDKANILDKDEHFYLVFEECYFELANIVPLYNKIRNYITQKPYSDEKFKLNFENSTLANGWDKNKEPDNTAILFIKDDKYYLGVMNKKNNKIFDDKAIKENKGEGYKKIVYKLLPGANKMLPKVFFSAKSIKFYNPSEDILRIRNHSTHTKNGSPQKGYEKFEFNIEDCRKFIDFYKQSISKHPEWKDFGFRFSDTQRYNSIDEFYREVENQGYKLTFENISESYIDSVVNQGKLYLFQIYNKDFSAYSKGRPNLHTLYWKALFDERNLQDVVYKLNGEAELFYRKQSIPKKITHPAKEAIANKNKDNPKKESVFEYDLIKDKRFTEDKFFFHCPITINFKSSGANKFNDEINLLLKEKANDVHILSIARGERHLAYYTLVDGKGNIIKQDTFNIIGNDRMKTNYHDKLAAIEKDRDSARKDWKKINNIKEMKEGYLSQVVHEIAKLVIEYNAIVVFADLNFGFKRGRFKVEKQVYQKLEKMLIEKLNYLVFKDNEFDKTGGVLRAYQLTAPFETFKKMGKQTGIIYYVPAGFTSKICPVTGFVNQLYPKYESVSKSQEFFSKFDKICYNLDKGYFEFSFDYKNFGDKAAKGKWTIASFGSRLINFRNSDKNHNWDTREVYPTKELEKLLKDYSIEYGHGECIKAAICGESDKKFFAKLTSVLNTILQMRNSKTGTELDYLISPVADVNGNFFDSRQAPKNMPQDADANGAYHIGLKGLMLLGRIKNNQEGKKLNLVIKNEEYFEFVQNRNN

SEQ ID NO: 215 - protein, 1300 aa, Francisella tularensis
  REGION 1..1300: note = MISC_FEATURE - Cpf1 D917A/D1255A polypeptide sequence
  source 1..1300: note = subspecies novicida
MSIYQEFVNKYSLSKTLRFELIPQGKTLENIKARGLILDDEKRAKDYKKAKQIIDKYHQFFIEEILSSVCISEDLLQNYSDVYFKLKKSDDDNLQKDFKSAKDTIKKQISEYIKDSEKFKNLFNQNLIDAKKGQESDLILWLKQSKDNGIELFKANSDITDIDEALEIIKSFKGWTTYFKGFHENRKNVYSSNDIPTSIIYRIVDDNLPKFLENKAKYESLKDKAPEAINYEQIKKDLAEELTFDIDYKTSEVNQRVFSLDEVFEIANFNNYLNQSGITKFNTIIGGKFVNGENTKRKGINEYINLYSQQINDKTLKKYKMSVLFKQILSDTESKSFVIDKLEDDSDVVTTMQSFYEQIAAFKTVEEKSIKETLSLLFDDLKAQKLDLSKIYFKNDKSLTDLSQQVFDDYSVIGTAVLEYITQQIAPKNLDNPSKKEQELIAKKTEKAKYLSLETIKLALEEFNKHRDIDKQCRFEEILANFAAIPMIFDEIAQNKDNLAQISIKYQNQGKKDLLQASAEDDVKAIKDLLDQTNNLLHKLKIFHISQSEDKANILDKDEHFYLVFEECYFELANIVPLYNKIRNYITQKPYSDEKFKLNFENSTLANGWDKNKEPDNTAILFIKDDKYYLGVMNKKNNKIFDDKAIKENKGEGYKKIVYKLLPGANKMLPKVFFSAKSIKFYNPSEDILRIRNHSTHTKNGSPQKGYEKFEFNIEDCRKFIDFYKQSISKHPEWKDFGFRFSDTQRYNSIDEFYREVENQGYKLTFENISESYIDSVVNQGKLYLFQIYNKDFSAYSKGRPNLHTLYWKALFDERNLQDVVYKLNGEAELFYRKQSIPKKITHPAKEAIANKNKDNPKKESVFEYDLIKDKRFTEDKFFFHCPITINFKSSGANKFNDEINLLLKEKANDVHILSIARGERHLAYYTLVDGKGNIIKQDTFNIIGNDRMKTNYHDKLAAIEKDRDSARKDWKKINNIKEMKEGYLSQVVHEIAKLVIEYNAIVVFEDLNFGFKRGRFKVEKQVYQKLEKMLIEKLNYLVFKDNEFDKTGGVLRAYQLTAPFETFKKMGKQTGIIYYVPAGFTSKICPVTGFVNQLYPKYESVSKSQEFFSKFDKICYNLDKGYFEFSFDYKNFGDKAAKGKWTIASFGSRLINFRNSDKNHNWDTREVYPTKELEKLLKDYSIEYGHGECIKAAICGESDKKFFAKLTSVLNTILQMRNSKTGTELDYLISPVADVNGNFFDSRQAPKNMPQDAAANGAYHIGLKGLMLLGRIKNNQEGKKLNLVIKNEEYFEFVQNRNN

SEQ ID NO: 216 - protein, 1300 aa, Francisella tularensis
  REGION 1..1300: note = MISC_FEATURE - Cpf1 E1006A/D1255A polypeptide sequence
  source 1..1300: note = subspecies novicida
MSIYQEFVNKYSLSKTLRFELIPQGKTLENIKARGLILDDEKRAKDYKKAKQIIDKYHQFFIEEILSSVCISEDLLQNYSDVYFKLKKSDDDNLQKDFKSAKDTIKKQISEYIKDSEKFKNLFNQNLIDAKKGQESDLILWLKQSKDNGIELFKANSDITDIDEALEIIKSFKGWTTYFKGFHENRKNVYSSNDIPTSIIYRIVDDNLPKFLENKAKYESLKDKAPEAINYEQIKKDLAEELTFDIDYKTSEVNQRVFSLDEVFEIANFNNYLNQSGITKFNTIIGGKFVNGENTKRKGINEYINLYSQQINDKTLKKYKMSVLFKQILSDTESKSFVIDKLEDDSDVVTTMQSFYEQIAAFKTVEEKSIKETLSLLFDDLKAQKLDLSKIYFKNDKSLTDLSQQVFDDYSVIGTAVLEYITQQIAPKNLDNPSKKEQELIAKKTEKAKYLSLETIKLALEEFNKHRDIDKQCRFEEILANFAAIPMIFDEIAQNKDNLAQISIKYQNQGKKDLLQASAEDDVKAIKDLLDQTNNLLHKLKIFHISQSEDKANILDKDEHFYLVFEECYFELANIVPLYNKIRNYITQKPYSDEKFKLNFENSTLANGWDKNKEPDNTAILFIKDDKYYLGVMNKKNNKIFDDKAIKENKGEGYKKIVYKLLPGANKMLPKVFFSAKSIKFYNPSEDILRIRNHSTHTKNGSPQKGYEKFEFNIEDCRKFIDFYKQSISKHPEWKDFGFRFSDTQRYNSIDEFYREVENQGYKLTFENISESYIDSVVNQGKLYLFQIYNKDFSAYSKGRPNLHTLYWKALFDERNLQDVVYKLNGEAELFYRKQSIPKKITHPAKEAIANKNKDNPKKESVFEYDLIKDKRFTEDKFFFHCPITINFKSSGANKFNDEINLLLKEKANDVHILSIDRGERHLAYYTLVDGKGNIIKQDTFNIIGNDRMKTNYHDKLAAIEKDRDSARKDWKKINNIKEMKEGYLSQVVHEIAKLVIEYNAIVVFADLNFGFKRGRFKVEKQVYQKLEKMLIEKLNYLVFKDNEFDKTGGVLRAYQLTAPFETFKKMGKQTGIIYYVPAGFTSKICPVTGFVNQLYPKYESVSKSQEFFSKFDKICYNLDKGYFEFSFDYKNFGDKAAKGKWTIASFGSRLINFRNSDKNHNWDTREVYPTKELEKLLKDYSIEYGHGECIKAAICGESDKKFFAKLTSVLNTILQMRNSKTGTELDYLISPVADVNGNFFDSRQAPKNMPQDAAANGAYHIGLKGLMLLGRIKNNQEGKKLNLVIKNEEYFEFVQNRNN

SEQ ID NO: 217 - protein, 1300 aa, Francisella tularensis
  REGION 1..1300: note = MISC_FEATURE - Cpf1 D917A/E1006A/D1255A polypeptide sequence
  source 1..1300: note = subspecies novicida
MSIYQEFVNKYSLSKTLRFELIPQGKTLENIKARGLILDDEKRAKDYKKAKQIIDKYHQFFIEEILSSVCISEDLLQNYSDVYFKLKKSDDDNLQKDFKSAKDTIKKQISEYIKDSEKFKNLFNQNLIDAKKGQESDLILWLKQSKDNGIELFKANSDITDIDEALEIIKSFKGWTTYFKGFHENRKNVYSSNDIPTSIIYRIVDDNLPKFLENKAKYESLKDKAPEAINYEQIKKDLAEELTFDIDYKTSEVNQRVFSLDEVFEIANFNNYLNQSGITKFNTIIGGKFVNGENTKRKGINEYINLYSQQINDKTLKKYKMSVLFKQILSDTESKSFVIDKLEDDSDVVTTMQSFYEQIAAFKTVEEKSIKETLSLLFDDLKAQKLDLSKIYFKNDKSLTDLSQQVFDDYSVIGTAVLEYITQQIAPKNLDNPSKKEQELIAKKTEKAKYLSLETIKLALEEFNKHRDIDKQCRFEEILANFAAIPMIFDEIAQNKDNLAQISIKYQNQGKKDLLQASAEDDVKAIKDLLDQTNNLLHKLKIFHISQSEDKANILDKDEHFYLVFEECYFELANIVPLYNKIRNYITQKPYSDEKFKLNFENSTLANGWDKNKEPDNTAILFIKDDKYYLGVMNKKNNKIFDDKAIKENKGEGYKKIVYKLLPGANKMLPKVFFSAKSIKFYNPSEDILRIRNHSTHTKNGSPQKGYEKFEFNIEDCRKFIDFYKQSISKHPEWKDFGFRFSDTQRYNSIDEFYREVENQGYKLTFENISESYIDSVVNQGKLYLFQIYNKDFSAYSKGRPNLHTLYWKALFDERNLQDVVYKLNGEAELFYRKQSIPKKITHPAKEAIANKNKDNPKKESVFEYDLIKDKRFTEDKFFFHCPITINFKSSGANKFNDEINLLLKEKANDVHILSIARGERHLAYYTLVDGKGNIIKQDTFNIIGNDRMKTNYHDKLAAIEKDRDSARKDWKKINNIKEMKEGYLSQVVHEIAKLVIEYNAIVVFADLNFGFKRGRFKVEKQVYQKLEKMLIEKLNYLVFKDNEFDKTGGVLRAYQLTAPFETFKKMGKQTGIIYYVPAGFTSKICPVTGFVNQLYPKYESVSKSQEFFSKFDKICYNLDKGYFEFSFDYKNFGDKAAKGKWTIASFGSRLINFRNSDKNHNWDTREVYPTKELEKLLKDYSIEYGHGECIKAAICGESDKKFFAKLTSVLNTILQMRNSKTGTELDYLISPVADVNGNFFDSRQAPKNMPQDAAANGAYHIGLKGLMLLGRIKNNQEGKKLNLVIKNEEYFEFVQNRNN

SEQ ID NO: 218 - protein, 1052 aa, Staphylococcus aureus
  REGION 1..1052: note = MISC_FEATURE - Exemplary SaCas9 polypeptide sequence
KRNYILGLDIGITSVGYGIIDYETRDVIDAGVRLFKEANVENNEGRRSKRGARRLKRRRRHRIQRVKKLLFDYNLLTDHSELSGINPYEARVKGLSQKLSEEEFSAALLHLAKRRGVHNVNEVEEDTGNELSTKEQISRNSKALEEKYVAELQLERLKKDGEVRGSINRFKTSDYVKEAKQLLKVQKAYHQLDQSFIDTYIDLLETRRTYYEGPGEGSPFGWKDIKEWYEMLMGHCTYFPEELRSVKYAYNADLYNALNDLNNLVITRDENEKLEYYEKFQIIENVFKQKKKPTLKQIAKEILVNEEDIKGYRVTSTGKPEFTNLKVYHDIKDITARKEIIENAELLDQIAKILTIYQSSEDIQEELTNLNSELTQEEIEQISNLKGYTGTHNLSLKAINLILDELWHTNDNQIAIFNRLKLVPKKVDLSQQKEIPTTLVDDFILSPVVKRSFIQSIKVINAIIKKYGLPNDIIIELAREKNSKDAQKMINEMQKRNRQTNERIEEIIRTTGKENAKYLIEKIKLHDMQEGKCLYSLEAIPLEDLLNNPFNYEVDHIIPRSVSFDNSFNNKVLVKQEENSKKGNRTPFQYLSSSDSKISYETFKKHILNLAKGKGRISKTKKEYLLEERDINRFSVQKDFINRNLVDTRYATRGLMNLLRSYFRVNNLDVKVKSINGGFTSFLRRKWKFKKERNKGYKHHAEDALIIANADFIFKEWKKLDKAKKVMENQMFEEKQAESMPEIETEQEYKEIFITPHQIKHIKDFKDYKYSHRVDKKPNRELINDTLYSTRKDDKGNTLIVNNLNGLYDKDNDKLKKLINKSPEKLLMYHHDPQTYQKLKLIMEQYGDEKNPLYKYYEETGNYLTKYSKKDNGPVIKKIKYYGNKLNAHLDITDDYPNSRNKVVKLSLKPYRFDVYLDNGVYKFVTVKNLDVIKKENYYEVNSKCYEEAKKLKKISNQAEFIASFYNNDLIKINGELYRVIGVNNDLLNRIEVNMIDITYREYLENMNDKRPPRIIKTIASKTQSIKKYSTDILGNLYEVKSKKHPQIIKKG

SEQ ID NO: 219 - protein, 1052 aa, Staphylococcus aureus
  REGION 1..1052: note = MISC_FEATURE - SaCas9n polypeptide sequence
KRNYILGLDIGITSVGYGIIDYETRDVIDAGVRLFKEANVENNEGRRSKRGARRLKRRRRHRIQRVKKLLFDYNLLTDHSELSGINPYEARVKGLSQKLSEEEFSAALLHLAKRRGVHNVNEVEEDTGNELSTKEQISRNSKALEEKYVAELQLERLKKDGEVRGSINRFKTSDYVKEAKQLLKVQKAYHQLDQSFIDTYIDLLETRRTYYEGPGEGSPFGWKDIKEWYEMLMGHCTYFPEELRSVKYAYNADLYNALNDLNNLVITRDENEKLEYYEKFQIIENVFKQKKKPTLKQIAKEILVNEEDIKGYRVTSTGKPEFTNLKVYHDIKDITARKEIIENAELLDQIAKILTIYQSSEDIQEELTNLNSELTQEEIEQISNLKGYTGTHNLSLKAINLILDELWHTNDNQIAIFNRLKLVPKKVDLSQQKEIPTTLVDDFILSPVVKRSFIQSIKVINAIIKKYGLPNDIIIELAREKNSKDAQKMINEMQKRNRQTNERIEEIIRTTGKENAKYLIEKIKLHDMQEGKCLYSLEAIPLEDLLNNPFNYEVDHIIPRSVSFDNSFNNKVLVKQEEASKKGNRTPFQYLSSSDSKISYETFKKHILNLAKGKGRISKTKKEYLLEERDINRFSVQKDFINRNLVDTRYATRGLMNLLRSYFRVNNLDVKVKSINGGFTSFLRRKWKFKKERNKGYKHHAEDALIIANADFIFKEWKKLDKAKKVMENQMFEEKQAESMPEIETEQEYKEIFITPHQIKHIKDFKDYKYSHRVDKKPNRELINDTLYSTRKDDKGNTLIVNNLNGLYDKDNDKLKKLINKSPEKLLMYHHDPQTYQKLKLIMEQYGDEKNPLYKYYEETGNYLTKYSKKDNGPVIKKIKYYGNKLNAHLDITDDYPNSRNKVVKLSLKPYRFDVYLDNGVYKFVTVKNLDVIKKENYYEVNSKCYEEAKKLKKISNQAEFIASFYNNDLIKINGELYRVIGVNNDLLNRIEVNMIDITYREYLENMNDKRPPRIIKTIASKTQSIKKYSTDILGNLYEVKSKKHPQIIKKG

SEQ ID NO: 220 - protein, 1052 aa, Staphylococcus aureus
  REGION 1..1052: note = MISC_FEATURE - SaKKH Cas9 polypeptide sequence
KRNYILGLDIGITSVGYGIIDYETRDVIDAGVRLFKEANVENNEGRRSKRGARRLKRRRRHRIQRVKKLLFDYNLLTDHSELSGINPYEARVKGLSQKLSEEEFSAALLHLAKRRGVHNVNEVEEDTGNELSTKEQISRNSKALEEKYVAELQLERLKKDGEVRGSINRFKTSDYVKEAKQLLKVQKAYHQLDQSFIDTYIDLLETRRTYYEGPGEGSPFGWKDIKEWYEMLMGHCTYFPEELRSVKYAYNADLYNALNDLNNLVITRDENEKLEYYEKFQIIENVFKQKKKPTLKQIAKEILVNEEDIKGYRVTSTGKPEFTNLKVYHDIKDITARKEIIENAELLDQIAKILTIYQSSEDIQEELTNLNSELTQEEIEQISNLKGYTGTHNLSLKAINLILDELWHTNDNQIAIFNRLKLVPKKVDLSQQKEIPTTLVDDFILSPVVKRSFIQSIKVINAIIKKYGLPNDIIIELAREKNSKDAQKMINEMQKRNRQTNERIEEIIRTTGKENAKYLIEKIKLHDMQEGKCLYSLEAIPLEDLLNNPFNYEVDHIIPRSVSFDNSFNNKVLVKQEEASKKGNRTPFQYLSSSDSKISYETFKKHILNLAKGKGRISKTKKEYLLEERDINRFSVQKDFINRNLVDTRYATRGLMNLLRSYFRVNNLDVKVKSINGGFTSFLRRKWKFKKERNKGYKHHAEDALIIANADFIFKEWKKLDKAKKVMENQMFEEKQAESMPEIETEQEYKEIFITPHQIKHIKDFKDYKYSHRVDKKPNRKLINDTLYSTRKDDKGNTLIVNNLNGLYDKDNDKLKKLINKSPEKLLMYHHDPQTYQKLKLIMEQYGDEKNPLYKYYEETGNYLTKYSKKDNGPVIKKIKYYGNKLNAHLDITDDYPNSRNKVVKLSLKPYRFDVYLDNGVYKFVTVKNLDVIKKENYYEVNSKCYEEAKKLKKISNQAEFIASFYKNDLIKINGELYRVIGVNNDLLNRIEVNMIDITYREYLENMNDKRPPHIIKTIASKTQSIKKYSTDILGNLYEVKSKKHPQIIKKG

SEQ ID NO: 221 - protein, 707 aa, synthetic construct
  REGION 1..707: note = Casphi-1 polypeptide sequence
MADTPTLFTQFLRHHLPGQRFRKDILKQAGRILANKGEDATIAFLRGKSEESPPDFQPPVKCPIIACSRPLTEWPIYQASVAIQGYVYGQSLAEFEASDPGCSKDGLLGWFDKTGVCTDYFSVQGLNLIFQNARKRYIGVQTKVTNRNEKRHKKLKRINAKRIAEGLPELTSDEPESALDETGHLIDPPGLNTNIYCYQQVSPKPLALSEVNQLPTAYAGYSTSGDDPIQPMVTKDRLSISKGQPGYIPEHQRALLSQKKHRRMRGYGLKARALLVIVRIQDDWAVIDLRSLLRNAYWRRIVQTKEPSTITKLLKLVTGDPVLDATRMVATFTYKPGIVQVRSAKCLKNKQGSKLFSERYLNETVSVTSIDLGSNNLVAVATYRLVNGNTPELLQRFTLPSHLVKDFERYKQAHDTLEDSIQKTAVASLPQGQQTEIRMWSMYGFREAQERVCQELGLADGSIPWNVMTATSTILTDLFLARGGDPKKCMFTSEPKKKKNSKQVLYKIRDRAWAKMYRTLLSKETREAWNKALWGLKRGSPDYARLSKRKEELARRCVNYTISTAEKRAQCGRTIVALEDLNIGFFHGRGKQEPGWVGLFTRKKENRWLMQALHKAFLELAHHRGYHVIEVNPAYTSQTCPVCRHCDPDNRDQHNREAFHCIGCGFRGNADLDVATHNIAMVAITGESLKRARGSVASKTPQPLAAE

SEQ ID NO: 222 - protein, 757 aa, synthetic construct
  REGION 1..757: note = Casphi-2 polypeptide sequence
MPKPAVESEFSKVLKKHFPGERFRSSYMKRGGKILAAQGEEAVVAYLQGKSEEEPPNFQPPAKCHVVTKSRDFAEWPIMKASEAIQRYIYALSTTERAACKPGKSSESHAAWFAATGVSNHGYSHVQGLNLIFDHTLGRYDGVLKKVQLRNEKARARLESINASRADEGLPEIKAEEEEVATNETGHLLQPPGINPSFYVYQTISPQAYRPRDEIVLPPEYAGYVRDPNAPIPLGVVRNRCDIQKGCPGYIPEWQREAGTAISPKTGKAVTVPGLSPKKNKRMRRYWRSEKEKAQDALLVTVRIGTDWVVIDVRGLLRNARWRTIAPKDISLNALLDLFTGDPVIDVRRNIVTFTYTLDACGTYARKWTLKGKQTKATLDKLTATQTVALVAIDLGQTNPISAGISRVTQENGALQCEPLDRFTLPDDLLKDISAYRIAWDRNEEELRARSVEALPEAQQAEVRALDGVSKETARTQLCADFGLDPKRLPWDKMSSNTTFISEALLSNSVSRDQVFFTPAPKKGAKKKAPVEVMRKDRTWARAYKPRLSVEAQKLKNEALWALKRTSPEYLKLSRRKEELCRRSINYVIEKTRRRTQCQIVIPVIEDLNVRFFHGSGKRLPGWDNFFTAKKENRWFIQGLHKAFSDLRTHRSFYVFEVRPERTSITCPKCGHCEVGNRDGEAFQCLSCGKTCNADLDVATHNLTQVALTGKTMPKREEPRDAQGTAPARKTKKASKSKAPPAEREDQTPAQEPSQTS

SEQ ID NO: 223 - protein, 766 aa, synthetic construct
  REGION 1..766: note = Casphi-3 polypeptide sequence
MEKEITELTKIRREFPNKKFSSTDMKKAGKLLKAEGPDAVRDFLNSCQEIIGDFKPPVKTNIVSISRPFEEWPVSMVGRAIQEYYFSLTKEELESVHPGTSSEDHKSFFNITGLSNYNYTSVQGLNLIFKNAKAIYDGTLVKANNKNKKLEKKFNEINHKRSLEGLPIITPDFEEPFDENGHLNNPPGINRNIYGYQGCAAKVFVPSKHKMVSLPKEYEGYNRDPNLSLAGFRNRLEIPEGEPGHVPWFQRMDIPEGQIGHVNKIQRFNFVHGKNSGKVKFSDKTGRVKRYHHSKYKDATKPYKFLEESKKVSALDSILAIITIGDDWVVFDIRGLYRNVFYRELAQKGLTAVQLLDLFTGDPVIDPKKGVVTFSYKEGVVPVFSQKIVPRFKSRDTLEKLTSQGPVALLSVDLGQNEPVAARVCSLKNINDKITLDNSCRISFLDDYKKQIKDYRDSLDELEIKIRLEAINSLETNQQVEIRDLDVFSADRAKANTVDMFDIDPNLISWDSMSDARVSTQISDLYLKNGGDESRVYFEINNKRIKRSDYNISQLVRPKLSDSTRKNLNDSIWKLKRTSEEYLKLSKRKLELSRAVVNYTIRQSKLLSGINDIVIILEDLDVKKKFNGRGIRDIGWDNFFSSRKENRWFIPAFHKAFSELSSNRGLCVIEVNPAWTSATCPDCGFCSKENRDGINFTCRKCGVSYHADIDVATLNIARVAVLGKPMSGPADRERLGDTKKPRVARSRKTMKRKDISNSTVEAMVTA

SEQ ID NO: 224 - protein, 765 aa, synthetic construct
  REGION 1..765: note = Casphi-4 polypeptide sequence
MYSLEMADLKSEPSLLAKLLRDRFPGKYWLPKYWKLAEKKRLTGGEEAACEYMADKQLDSPPPNFRPPARCVILAKSRPFEDWPVHRVASKAQSFVIGLSEQGFAALRAAPPSTADARRDWLRSHGASEDDLMALEAQLLETIMGNAISLHGGVLKKIDNANVKAAKRLSGRNEARLNKGLQELPPEQEGSAYGADGLLVNPPGLNLNIYCRKSCCPKPVKNTARFVGHYPGYLRDSDSILISGTMDRLTIIEGMPGHIPAWQREQGLVKPGGRRRRLSGSESNMRQKVDPSTGPRRSTRSGTVNRSNQRTGRNGDPLLVEIRMKEDWVLLDARGLLRNLRWRESKRGLSCDHEDLSLSGLLALFSGDPVIDPVRNEVVFLYGEGIIPVRSTKPVGTRQSKKLLERQASMGPLTLISCDLGQTNLIAGRASAISLTHGSLGVRSSVRIELDPEIIKSFERLRKDADRLETEILTAAKETLSDEQRGEVNSHEKDSPQTAKASLCRELGLHPPSLPWGQMGPSTTFIADMLISHGRDDDAFLSHGEFPTLEKRKKFDKRFCLESRPLLSSETRKALNESLWEVKRTSSEYARLSQRKKEMARRAVNFVVEISRRKTGLSNVIVNIEDLNVRIFHGGGKQAPGWDGFFRPKSENRWFIQAIHKAFSDLAAHHGIPVIESDPQRTSMTCPECGHCDSKNRNGVRFLCKGCGASMDADFDAACRNLERVALTGKPMPKPSTSCERLLSATTGKVCSDHSLSHDAIEKAS

SEQ ID NO: 225 - protein, 793 aa, synthetic construct
  REGION 1..793: note = Casphi-5 polypeptide sequence
MSSLPTPLELLKQKHADLFKGLQFSSKDNKMAGKVLKKDGEEAALAFLSERGVSRGELPNFRPPAKTLVVAQSRPFEEFPIYRVSEAIQLYVYSLSVKELETVPSGSSTKKEHQRFFQDSSVPDFGYTSVQGLNKIFGLARGIYLGVITRGENQLQKAKSKHEALNKKRRASGEAETEFDPTPYEYMTPERKLAKPPGVNHSIMCYVDISVDEFDFRNPDGIVLPSEYAGYCREINTAIEKGTVDRLGHLKGGPGYIPGHQRKESTTEGPKINFRKGRIRRSYTALYAKRDSRRVRQGKLALPSYRHHMMRLNSNAESAILAVIFFGKDWVVFDLRGLLRNVRWRNLFVDGSTPSTLLGMFGDPVIDPKRGVVAFCYKEQIVPVVSKSITKMVKAPELLNKLYLKSEDPLVLVAIDLGQTNPVGVGVYRVMNASLDYEVVTRFALESELLREIESYRQRTNAFEAQIRAETFDAMTSEEQEEITRVRAFSASKAKENVCHRFGMPVDAVDWATMGSNTIHIAKWVMRHGDPSLVEVLEYRKDNEIKLDKNGVPKKVKLTDKRIANLTSIRLRFSQETSKHYNDTMWELRRKHPVYQKLSKSKADFSRRVVNSIIRRVNHLVPRARIVFIIEDLKNLGKVFHGSGKRELGWDSYFEPKSENRWFIQVLHKAFSETGKHKGYYIIECWPNWTSCTCPKCSCCDSENRHGEVFRCLACGYTCNTDFGTAPDNLVKIATTGKGLPGPKKRCKGSSKGKNPKIARSSETGVSVTESGAPKVKKSSPTQTSQSSSQSAP

SEQ ID NO: 226 - protein, 441 aa, synthetic construct
  REGION 1..441: note = Casphi-6 polypeptide sequence
MNKIEKEKTPLAKLMNENFAGLRFPFAIIKQAGKKLLKEGELKTIEYMTGKGSIEPLPNFKPPVKCLIVAKRRDLKYFPICKASCEIQSYVYSLNYKDFMDYFSTPMTSQKQHEEFFKKSGLNIEYQNVAGLNLIFNNVKNTYNGVILKVKNRNEKLKKKAIKNNYEFEEIKTFNDDGCLINKPGINNVIYCFQSISPKILKNITHLPKEYNDYDCSVDRNIIQKYVSRLDIPESQPGHVPEWQRKLPEFNNTNNPRRRRKWYSNGRNISKGYSVDQVNQAKIEDSLLAQIKIGEDWIILDIRGLLRDLNRRELISYKNKLTIKDVLGFFSDYPIIDIKKNLVTFCYKEGVIQVVSQKSIGNKKSKQLLEKLIENKPIALVSIDLGQTNPVSVKISKLNKINNKISIESFTYRFLNEEILKEIEKYRKDYDKLELKLINEA

SEQ ID NO: 227 - protein, 772 aa, synthetic construct
  REGION 1..772: note = Casphi-7 polypeptide sequence
MSNTAVSTREHMSNKTTPPSPLSLLLRAHFPGLKFESQDYKIAGKKLRDGGPEAVISYLTGKGQAKLKDVKPPAKAFVIAQSRPFIEWDLVRVSRQIQEKIFGIPATKGRPKQDGLSETAFNEAVASLEVDGKSKLNEETRAAFYEVLGLDAPSLHAQAQNALIKSAISIREGVLKKVENRNEKNLSKTKRRKEAGEEATFVEEKAHDERGYLIHPPGVNQTIPGYQAVVIKSCPSDFIGLPSGCLAKESAEALTDYLPHDRMTIPKGQPGYVPEWQHPLLNRRKNRRRRDWYSASLNKPKATCSKRSGTPNRKNSRTDQIQSGRFKGAIPVLMRFQDEWVIIDIRGLLRNARYRKLLKEKSTIPDLLSLFTGDPSIDMRQGVCTFIYKAGQACSAKMVKTKNAPEILSELTKSGPVVLVSIDLGQTNPIAAKVSRVTQLSDGQLSHETLLRELLSNDSSDGKEIARYRVASDRLRDKLANLAVERLSPEHKSEILRAKNDTPALCKARVCAALGLNPEMIAWDKMTPYTEFLATAYLEKGGDRKVATLKPKNRPEMLRRDIKFKGTEGVRIEVSPEAAEAYREAQWDLQRTSPEYLRLSTWKQELTKRILNQLRHKAAKSSQCEVVVMAFEDLNIKMMHGNGKWADGGWDAFFIKKRENRWFMQAFHKSLTELGAHKGVPTIEVTPHRTSITCTKCGHCDKANRDGERFACQKCGFVAHADLEIATDNIERVALTGKPMPKPESERSGDAKKSVGARKAAFKPEEDAEAAE

SEQ ID NO: 228 - protein, 717 aa, synthetic construct
  REGION 1..717: note = Casphi-8 polypeptide sequence
MIKPTVSQFLTPGFKLIRNHSRTAGLKLKNEGEEACKKFVRENEIPKDECPNFQGGPAIANIIAKSREFTEWEIYQSSLAIQEVIFTLPKDKLPEPILKEEWRAQWLSEHGLDTVPYKEAAGLNLIIKNAVNTYKGVQVKVDNKNKNNLAKINRKNEIAKLNGEQEISFEEIKAFDDKGYLLQKPSPNKSIYCYQSVSPKPFITSKYHNVNLPEEYIGYYRKSNEPIVSPYQFDRLRIPIGEPGYVPKWQYTFLSKKENKRRKLSKRIKNVSPILGIICIKKDWCVFDMRGLLRTNHWKKYHKPTDSINDLFDYFTGDPVIDTKANVVRFRYKMENGIVNYKPVREKKGKELLENICDQNGSCKLATVDVGQNNPVAIGLFELKKVNGELTKTLISRHPTPIDFCNKITAYRERYDKLESSIKLDAIKQLTSEQKIEVDNYNNNFTPQNTKQIVCSKLNINPNDLPWDKMISGTHFISEKAQVSNKSEIYFTSTDKGKTKDVMKSDYKWFQDYKPKLSKEVRDALSDIEWRLRRESLEFNKLSKSREQDARQLANWISSMCDVIGIENLVKKNNFFGGSGKREPGWDNFYKPKKENRWWINAIHKALTELSQNKGKRVILLPAMRTSITCPKCKYCDSKNRNGEKFNCLKCGIELNADIDVATENLATVAITAQSMPKPTCERSGDAKKPVRARKAKAPEFHDKLAPSYTVVLREAV

SEQ ID NO: 229 - protein, 793 aa, synthetic construct
  REGION 1..793: note = Casphi-9 polypeptide sequence
MRSSREIGDKILMRQPAEKTAFQVFRQEVIGTQKLSGGDAKTAGRLYKQGKMEAAREWLLKGARDDVPPNFQPPAKCLVVAVSHPFEEWDISKTNHDVQAYIYAQPLQAEGHLNGLSEKWEDTSADQHKLWFEKTGVPDRGLPVQAINKIAKAAVNRAFGVVRKVENRNEKRRSRDNRIAEHNRENGLTEVVREAPEVATNADGFLLHPPGIDPSILSYASVSPVPYNSSKHSFVRLPEEYQAYNVEPDAPIPQFVVEDRFAIPPGQPGYVPEWQRLKCSTNKHRRMRQWSNQDYKPKAGRRAKPLEFQAHLTRERAKGALLVVMRIKEDWVVFDVRGLLRNVEWRKVLSEEAREKLTLKGLLDLFTGDPVIDTKRGIVTFLYKAEITKILSKRTVKTKNARDLLLRLTEPGEDGLRREVGLVAVDLGQTHPIAAAIYRIGRTSAGALESTVLHRQGLREDQKEKLKEYRKRHTALDSRLRKEAFETLSVEQQKEIVTVSGSGAQITKDKVCNYLGVDPSTLPWEKMGSYTHFISDDFLRRGGDPNIVHFDRQPKKGKVSKKSQRIKRSDSQWVGRMRPRLSQETAKARMEADWAAQNENEEYKRLARSKQELARWCVNTLLQNTRCITQCDEIVVVIEDLNVKSLHGKGAREPGWDNFFTPKTENRWFIQILHKTFSELPKHRGEHVIEGCPLRTSITCPACSYCDKNSRNGEKFVCVACGATFHADFEVATYNLVRLATTGMPMPKSLERQGGGEKAGGARKARKKAKQVEKIVVQANANVTMNGASLHSP

SEQ ID NO: 230 - protein, 812 aa, synthetic construct
  REGION 1..812: note = Casphi-10 polypeptide sequence
MDMLDTETNYATETPAQQQDYSPKPPKKAQRAPKGFSKKARPEKKPPKPITLFTQKHFSGVRFLKRVIRDASKILKLSESRTITFLEQAIERDGSAPPDVTPPVHNTIMAVTRPFEEWPEVILSKALQKHCYALTKKIKIKTWPKKGPGKKCLAAWSARTKIPLIPGQVQATNGLFDRIGSIYDGVEKKVTNRNANKKLEYDEAIKEGRNPAVPEYETAYNIDGTLINKPGYNPNLYITQSRTPRLITEADRPLVEKILWQMVEKKTQSRNQARRARLEKAAHLQGLPVPKFVPEKVDRSQKIEIRIIDPLDKIEPYMPQDRMAIKASQDGHVPYWQRPFLSKRRNRRVRAGWGKQVSSIQAWLTGALLVIVRLGNEAFLADIRGALRNAQWRKLLKPDATYQSLFNLFTGDPVVNTRTNHLTMAYREGVVNIVKSRSFKGRQTREHLLTLLGQGKTVAGVSFDLGQKHAAGLLAAHFGLGEDGNPVFTPIQACFLPQRYLDSLTNYRNRYDALTLDMRRQSLLALTPAQQQEFADAQRDPGGQAKRACCLKLNLNPDEIRWDLVSGISTMISDLYIERGGDPRDVHQQVETKPKGKRKSEIRILKIRDGKWAYDFRPKIADETRKAQREQLWKLQKASSEFERLSRYKINIARAIANWALQWGRELSGCDIVIPVLEDLNVGSKFFDGKGKWLLGWDNRFTPKKENRWFIKVLHKAVAELAPHRGVPVYEVMPHRTSMTCPACHYCHPTNREGDRFECQSCHVVKNTDRDVAPYNILRVAVEGKTLDRWQAEKKPQAEPDRPMILIDNQES

SEQ ID NO: 231 - protein, 84 aa, synthetic construct
  REGION 1..84: note = synthetic polypeptide sequence
MTNLSDIIEKETGKQLVIQESILMLPEEVEEVIGNKPESDILVHTAYDESTDENVMLLTSDAPEYKPWALVIQDSNGENKIKML

SEQ ID NO: 232 - protein, 1129 aa, Alicyclobacillus acidoterrestris
  REGION 1..1129: note = MISC_FEATURE - Cas12b/C2c1; sp|T0D7A2|C2C1_ALIAG CRISPR-associated endonuclease C2c1 OS = Alicyclobacillus acido-terrestris (strain ATCC 49025 /DSM 3922/ CIP 106132 / NCIMB 13137/GD3B) GN=c2c1 PE=1 SV=1; Cas12b/C2c1 polypeptide sequence
MAVKSIKVKLRLDDMPEIRAGLWKLHKEVNAGVRYYTEWLSLLRQENLYRRSPNGDGEQECDKTAEECKAELLERLRARQVENGHRGPAGSDDELLQLARQLYELLVPQAIGAKGDAQQIARKFLSPLADKDAVGGLGIAKAGNKPRWVRMREAGEPGWEEEKEKAETRKSADRTADVLRALADFGLKPLMRVYTDSEMSSVEWKPLRKGQAVRTWDRDMFQQAIERMMSWESWNQRVGQEYAKLVEQKNRFEQKNFVGQEHLVHLVNQLQQDMKEASPGLESKEQTAHYVTGRALRGSDKVFEKWGKLAPDAPFDLYDAEIKNVQRRNTRRFGSHDLFAKLAEPEYQALWREDASFLTRYAVYNSILRKLNHAKMFATFTLPDATAHPIWTRFDKLGGNLHQYTFLFNEFGERRHAIRFHKLLKVENGVAREVDDVTVPISMSEQLDNLLPRDPNEPIALYFRDYGAEQHFTGEFGGAKIQCRRDQLAHMHRRRGARDVYLNVSVRVQSQSEARGERRPPYAAVFRLVGDNHRAFVHFDKLSDYLAEHPDDGKLGSEGLLSGLRVMSVDLGLRTSASISVFRVARKDELKPNSKGRVPFFFPIKGNDNLVAVHERSQLLKLPGETESKDLRAIREERQRTLRQLRTQLAYLRLLVRCGSEDVGRRERSWAKLIEQPVDAANHMTPDWREAFENELQKLKSLHGICSDKEWMDAVYESVRRVWRHMGKQVRDWRKDVRSGERPKIRGYAKDVVGGNSIEQIEYLERQYKFLKSWSFFGKVSGQVIRAEKGSRFAITLREHIDHAKEDRLKKLADRIIMEALGYVYALDERGKGKWVAKYPPCQLILLEELSEYQFNNDRPPSENNQLMQWSHRGVFQELINQAQVHDLLVGTMYAAFSSRFDARTGAPGIRCRRVPARCTQEHNPEPFPWWLNKFVVEHTLDACPLRADDLIPTGEGEIFVSPFSAEEGDFHQIHADLNAAQNLQQRLWSDFDISQIRLRCDWGEVDGELVLIPRLTGKRTADSYSNKVFYTNTGVTYYERERGKKRRKVFAQEKLSEEEAELLVEADEAREKSVVLMRDPSGIINRGNWTRQKEFWSMVNQRIEGYLVKQIRSRVPLQDSACENTGDI

SEQ ID NO: 233 - protein, 1368 aa, Mus musculus
  REGION 1..1368: note = MISC_FEATURE - high fidelity Cas9 polypeptide sequence
MDKKYSIGLAIGTNSVGWAVITDEYKVPSKKFKVLGNTDRHSIKKNLIGALLFDSGETAEATRLKRTARRRYTRRKNRICYLQEIFSNEMAKVDDSFFHRLEESFLVEEDKKHERHPIFGNIVDEVAYHEKYPTIYHLRKKLVDSTDKADLRLIYLALAHMIKFRGHFLIEGDLNPDNSDVDKLFIQLVQTYNQLFEENPINASGVDAKAILSARLSKSRRLENLIAQLPGEKKNGLFGNLIALSLGLTPNFKSNFDLAEDAKLQLSKDTYDDDLDNLLAQIGDQYADLFLAAKNLSDAILLSDILRVNTEITKAPLSASMIKRYDEHHQDLTLLKALVRQQLPEKYKEIFFDQSKNGYAGYIDGGASQEEFYKFIKPILEKMDGTEELLVKLNREDLLRKQRTFDNGSIPHQIHLGELHAILRRQEDFYPFLKDNREKIEKILTFRIPYYVGPLARGNSRFAWMTRKSEETITPWNFEEVVDKGASAQSFIERMTAFDKNLPNEKVLPKHSLLYEYFTVYNELTKVKYVTEGMRKPAFLSGEQKKAIVDLLFKTNRKVTVKQLKEDYFKKIECFDSVEISGVEDRFNASLGTYHDLLKIIKDKDFLDNEENEDILEDIVLTLTLFEDREMIEERLKTYAHLFDDKVMKQLKRRRYTGWGALSRKLINGIRDKQSGKTILDFLKSDGFANRNFMALIHDDSLTFKEDIQKAQVSGQGDSLHEHIANLAGSPAIKKGILQTVKVVDELVKVMGRHKPENIVIEMARENQTTQKGQKNSRERMKRIEEGIKELGSQILKEHPVENTQLQNEKLYLYYLQNGRDMYVDQELDINRLSDYDVDHIVPQSFLKDDSIDNKVLTRSDKNRGKSDNVPSEEVVKKMKNYWRQLLNAKLITQRKFDNLTKAERGGLSELDKAGFIKRQLVETRAITKHVAQILDSRMNTKYDENDKLIREVKVITLKSKLVSDFRKDFQFYKVREINNYHHAHDAYLNAVVGTALIKKYPKLESEFVYGDYKVYDVRKMIAKSEQEIGKATAKYFFYSNIMNFFKTEITLANGEIRKRPLIETNGETGEIVWDKGRDFATVRKVLSMPQVNIVKKTEVQTGGFSKESILPKRNSDKLIARKKDWDPKKYGGFDSPTVAYSVLVVAKVEKGKSKKLKSVKELLGITIMERSSFEKNPIDFLEAKGYKEVKKDLIIKLPKYSLFELENGRKRMLASAGELQKGNELALPSKYVNFLYLASHYEKLKGSPEDNEQKQLFVEQHKHYLDEIIEQISEFSKRVILADANLDKVLSAYNKHRDKPIREQAENIIHLFTLTNLGAPAAFKYFDTTIDRKRYTSTKEVLDATLIHQSITGLYETRIDLSQLGGD

SEQ ID NO: 234 - protein, 1368 aa, Streptococcus pyogenes
  REGION 1..1368: note = MISC_FEATURE - PAM-binding SpEQR Cas9 polypeptide sequence
MDKKYSIGLAIGTNSVGWAVITDEYKVPSKKFKVLGNTDRHSIKKNLIGALLFDSGETAEATRLKRTARRRYTRRKNRICYLQEIFSNEMAKVDDSFFHRLEESVLVEEDKKHERHPIFGNIVDEVAYHEKYPTIYHLRKKLVDSTDKADLRLIYLALAHMIKFRGHFLIEGDLNPDNSDVDKLFIQLVQTYNQLFEENPINASGVDAKAILSARLSKSRRLENLIAQLPGEKKNGLFGNLIALSLGLTPNFKSNFDLAEDAKLQLSKDTYDDDLDNLLAQIGDQYADLFLAAKNLSDAILLSDILRVNTEITKAPLSASMIKRYDEHHQDLTLLKALVRQQLPEKYKEIFFDQSKNGYAGYIDGGASQEEFYKFIKPILEKMDGTEELLVKLNREDLLRKQRTFDNGSIPHQIHLGELHAILRRQEDFYPFLKDNREKIEKILTFRIPYYVGPLARGNSRFAWMTRKSEETITPWNFEEVVDKGASAQSFIERMTNFDKNLPNEKVLPKHSLLYEYFTVYNELTKVKYVTEGMRKPAFLSGEQKKAIVDLLFKTNRKVTVKQLKEDYFKKIECFDSVEISGVEDRFNASLGTYHDLLKIIKDKDFLDNEENEDILEDIVLTLTLFEDREMIEERLKTYAHLFDDKVMKQLKRRRYTGWGRLSRKLINGIRDKQSGKTILDFLKSDGFANRNFMQLIHDDSLTFKEDIQKAQVSGQGDSLHEHIANLAGSPAIKKGILQTVKVVDELVKVMGRHKPENIVIEMARENQTTQKGQKNSRERMKRIEEGIKELGSQILKEHPVENTQLQNEKLYLYYLQNGRDMYVDQELDINRLSDYDVDHIVPQSFLKDDSIDNKVLTRSDKNRGKSDNVPSEEVVKKMKNYWRQLLNAKLITQRKFDNLTKAERGGLSELDKAGFIKRQLVETRQITKHVAQILDSRMNTKYDENDKLIREVKVITLKSKLVSDFRKDFQFYKVREINNYHHAHDAYLNAVVGTALIKKYPKLESEFVYGDYKVYDVRKMIAKSEQEIGKATAKYFFYSNIMNFFKTEITLANGEIRKRPLIETNGETGEIVWDKGRDFATVRKVLSMPQVNIVKKTEVQTGGFSKESILPKRNSDKLIARKKDWDPKKYGGFESPTVAYSVLVVAKVEKGKSKKLKSVKELLGITIMERSSFEKNPIDFLEAKGYKEVKKDLIIKLPKYSLFELENGRKRMLASAGELQKGNELALPSKYVNFLYLASHYEKLKGSPEDNEQKQLFVEQHKHYLDEIIEQISEFSKRVILADANLDKVLSAYNKHRDKPIREQAENIIHLFTLTNLGAPAAFKYFDTTIDRKQYRSTKEVLDATLIHQSITGLYETRIDLSQLGGD

SEQ ID NO: 235 - protein, 1368 aa, Streptococcus pyogenes
  REGION 1..1368: note = MISC_FEATURE - PAM-binding SpVQR Cas9 polypeptide sequence
MDKKYSIGLAIGTNSVGWAVITDEYKVPSKKFKVLGNTDRHSIKKNLIGALLFDSGETAEATRLKRTARRRYTRRKNRICYLQEIFSNEMAKVDDSFFHRLEESFLVEEDKKHERHPIFGNIVDEVAYHEKYPTIYHLRKKLVDSTDKADLRLIYLALAHMIKFRGHFLIEGDLNPDNSDVDKLFIQLVQTYNQLFEENPINASGVDAKAILSARLSKSRRLENLIAQLPGEKKNGLFGNLIALSLGLTPNFKSNFDLAEDAKLQLSKDTYDDDLDNLLAQIGDQYADLFLAAKNLSDAILLSDILRVNTEITKAPLSASMIKRYDEHHQDLTLLKALVRQQLPEKYKEIFFDQSKNGYAGYIDGGASQEEFYKFIKPILEKMDGTEELLVKLNREDLLRKQRTFDNGSIPHQIHLGELHAILRRQEDFYPFLKDNREKIEKILTFRIPYYVGPLARGNSRFAWMTRKSEETITPWNFEEVVDKGASAQSFIERMTNFDKNLPNEKVLPKHSLLYEYFTVYNELTKVKYVTEGMRKPAFLSGEQKKAIVDLLFKTNRKVTVKQLKEDYFKKIECFDSVEISGVEDRFNASLGTYHDLLKIIKDKDFLDNEENEDILEDIVLTLTLFEDREMIEERLKTYAHLFDDKVMKQLKRRRYTGWGRLSRKLINGIRDKQSGKTILDFLKSDGFANRNFMQLIHDDSLTFKEDIQKAQVSGQGDSLHEHIANLAGSPAIKKGILQTVKVVDELVKVMGRHKPENIVIEMARENQTTQKGQKNSRERMKRIEEGIKELGSQILKEHPVENTQLQNEKLYLYYLQNGRDMYVDQELDINRLSDYDVDHIVPQSFLKDDSIDNKVLTRSDKNRGKSDNVPSEEVVKKMKNYWRQLLNAKLITQRKFDNLTKAERGGLSELDKAGFIKRQLVETRQITKHVAQILDSRMNTKYDENDKLIREVKVITLKSKLVSDFRKDFQFYKVREINNYHHAHDAYLNAVVGTALIKKYPKLESEFVYGDYKVYDVRKMIAKSEQEIGKATAKYFFYSNIMNFFKTEITLANGEIRKRPLIETNGETGEIVWDKGRDFATVRKVLSMPQVNIVKKTEVQTGGFSKESILPKRNSDKLIARKKDWDPKKYGGFVSPTVAYSVLVVAKVEKGKSKKLKSVKELLGITIMERSSFEKNPIDFLEAKGYKEVKKDLIIKLPKYSLFELENGRKRMLASAGELQKGNELALPSKYVNFLYLASHYEKLKGSPEDNEQKQLFVEQHKHYLDEIIEQISEFSKRVILADANLDKVLSAYNKHRDKPIREQAENIIHLFTLTNLGAPAAFKYFDTTIDRKQYRSTKEVLDATLIHQSITGLYETRIDLSQLGGD

SEQ ID NO: 236 - protein, 1368 aa, Streptococcus pyogenes
  REGION 1..1368: note = MISC_FEATURE - SpVQR Cas9 polypeptide sequence
MDKKYSIGLAIGTNSVGWAVITDEYKVPSKKFKVLGNTDRHSIKKNLIGALLFDSGETAEATRLKRTARRRYTRRKNRICYLQEIFSNEMAKVDDSFFHRLEESFLVEEDKKHERHPIFGNIVDEVAYHEKYPTIYHLRKKLVDSTDKADLRLIYLALAHMIKFRGHFLIEGDLNPDNSDVDKLFIQLVQTYNQLFEENPINASGVDAKAILSARLSKSRRLENLIAQLPGEKKNGLFGNLIALSLGLTPNFKSNFDLAEDAKLQLSKDTYDDDLDNLLAQIGDQYADLFLAAKNLSDAILLSDILRVNTEITKAPLSASMIKRYDEHHQDLTLLKALVRQQLPEKYKEIFFDQSKNGYAGYIDGGASQEEFYKFIKPILEKMDGTEELLVKLNREDLLRKQRTFDNGSIPHQIHLGELHAILRRQEDFYPFLKDNREKIEKILTFRIPYYVGPLARGNSRFAWMTRKSEETITPWNFEEVVDKGASAQSFIERMTNFDKNLPNEKVLPKHSLLYEYFTVYNELTKVKYVTEGMRKPAFLSGEQKKAIVDLLFKTNRKVTVKQLKEDYFKKIECFDSVEISGVEDRFNASLGTYHDLLKIIKDKDFLDNEENEDILEDIVLTLTLFEDREMIEERLKTYAHLFDDKVMKQLKRRRYTGWGRLSRKLINGIRDKQSGKTILDFLKSDGFANRNFMQLIHDDSLTFKEDIQKAQVSGQGDSLHEHIANLAGSPAIKKGILQTVKVVDELVKVMGRHKPENIVIEMARENQTTQKGQKNSRERMKRIEEGIKELGSQILKEHPVENTQLQNEKLYLYYLQNGRDMYVDQELDINRLSDYDVDHIVPQSFLKDDSIDNKVLTRSDKNRGKSDNVPSEEVVKKMKNYWRQLLNAKLITQRKFDNLTKAERGGLSELDKAGFIKRQLVETRQITKHVAQILDSRMNTKYDENDKLIREVKVITLKSKLVSDFRKDFQFYKVREINNYHHAHDAYLNAVVGTALIKKYPKLESEFVYGDYKVYDVRKMIAKSEQEIGKATAKYFFYSNIMNFFKTEITLANGEIRKRPLIETNGETGEIVWDKGRDFATVRKVLSMPQVNIVKKTEVQTGGFSKESILPKRNSDKLIARKKDWDPKKYGGFVSPTVAYSVLVVAKVEKGKSKKLKSVKELLGITIMERSSFEKNPIDFLEAKGYKEVKKDLIIKLPKYSLFELENGRKRMLASARELQKGNELALPSKYVNFLYLASHYEKLKGSPEDNEQKQLFVEQHKHYLDEIIEQISEFSKRVILADANLDKVLSAYNKHRDKPIREQAENIIHLFTLTNLGAPAAFKYFDTTIDRKEYRSTKEVLDATLIHQSITGLYETRIDLSQLGGD

SEQ ID NO: 237 - protein, 1359 aa, Streptococcus macacae
  REGION 1..1359: note = MISC_FEATURE - SpyMacCas9 polypeptide sequence
MDKKYSIGLDIGTNSVGWAVITDDYKVPSKKFKVLGNTDRHSIKKNLIGALLFGSGETAEATRLKRTARRRYTRRKNRICYLQEIFSNEMAKVDDSFFHRLEESFLVEEDKKHERHPIFGNIVDEVAYHEKYPTIYHLRKKLADSTDKADLRLIYLALAHMIKFRGHFLIEGDLNPDNSDVDKLFIQLVQIYNQLFEENPINASRVDAKAILSARLSKSRRLENLIAQLPGEKRNGLFGNLIALSLGLTPNFKSNFDLAEDAKLQLSKDTYDDDLDNLLAQIGDQYADLFLAAKNLSDAILLSDILRVNSEITKAPLSASMIKRYDEHHQDLTLLKALVRQQLPEKYKEIFFDQSKNGYAGYIDGGASQEEFYKFIKPILEKMDGTEELLVKLNREDLLRKQRTFDNGSIPHQIHLGELHAILRRQEDFYPFLKDNREKIEKILTFRIPYYVGPLARGNSRFAWMTRKSEETITPWNFEEVVDKGASAQSFIERMTNFDKNLPNEKVLPKHSLLYEYFTVYNELTKVKYVTEGMRKPAFLSGEQKKAIVDLLFKTNRKVTVKQLKEDYFKKIECFDSVEISGVEDRFNASLGAYHDLLKIIKDKDFLDNEENEDILEDIVLTLTLFEDRGMIEERLKTYAHLFDDKVMKQLKRRRYTGWGRLSRKLINGIRDKQSGKTILDFLKSDGFANRNFMQLIHDDSLTFKEDIQKAQVSGQGHSLHEQIANLAGSPAIKKGILQTVKIVDELVKVMGHKPENIVIEMARENQTTQKGQKNSRERMKRIEEGIKELGSQILKEHPVENTQLQNEKLYLYYLQNGRDMYVDQELDINRLSDYDVDHIVPQSFIKDDSIDNKVLTRSDKNRGKSDNVPSEEVVKKMKNYWRQLLNAKLITQRKFDNLTKAERGGLSELDKAGFIKRQLVETRQITKHVAQILDSRMNTKYDENDKLIREVKVITLKSKLVSDFRKDFQFYKVREINNYHHAHDAYLNAVVGTALIKKYPKLESEFVYGDYKVYDVRKMIAKSEQEIGKATAKYFFYSNIMNFFKTEITLANGEIRKRPLIETNGETGEIVWDKGRDFATVRKVLSMPQVNIVKKTEIQTVGQNGGLFDDNPKSPLEVTPSKLVPLKKELNPKKYGGYQKPTTAYPVLLITDTKQLIPISVMNKKQFEQNPVKFLRDRGYQQVGKNDFIKLPKYTLVDIGDGIKRLWASSKEIHKGNQLVVSKKSQILLYHAHHLDSDLSNDYLQNHNQQFDVLFNEIISFSKKCKLGKEHIQKIENVYSNKKNSASIEELAESFIKLLGFTQLGATSPFNFLGVKLNQKQYKGKKDYILPCTEGTLIRQSITGLYETRVDLSKIGED

SEQ ID NO: 238 - protein, 1410 aa, synthetic construct
  REGION 1..1410: note = CP5 polypeptide sequence
  REGION 1..341: note = MISC_FEATURE - Sequence derived from Cas9
  REGION 342..362: note = MISC_FEATURE - Linker sequence
  REGION 363..1388: note = MISC_FEATURE - Sequence derived from Cas9
  REGION 1389..1410: note = MISC_FEATURE - Bipartite nuclear localization sequence
EIGKATAKYFFYSNIMNFFKTEITLANGEIRKRPLIETNGETGEIVWDKGRDFATVRKVLSMPQVNIVKKTEVQTGGFSKESILPKRNSDKLIARKKDWDPKKYGGFMQPTVAYSVLVVAKVEKGKSKKLKSVKELLGITIMERSSFEKNPIDFLEAKGYKEVKKDLIIKLPKYSLFELENGRKRMLASAKFLQKGNELALPSKYVNFLYLASHYEKLKGSPEDNEQKQLFVEQHKHYLDEIIEQISEFSKRVILADANLDKVLSAYNKHRDKPIREQAENIIHLFTLTNLGAPRAFKYFDTTIARKEYRSTKEVLDATLIHQSITGLYETRIDLSQLGGDGGSGGSGGSGGSGGSGGSGGMDKKYSIGLAIGTNSVGWAVITDEYKVPSKKFKVLGNTDRHSIKKNLIGALLFDSGETAEATRLKRTARRRYTRRKNRICYLQEIFSNEMAKVDDSFFHRLEESFLVEEDKKHERHPIFGNIVDEVAYHEKYPTIYHLRKKLVDSTDKADLRLIYLALAHMIKFRGHFLIEGDLNPDNSDVDKLFIQLVQTYNQLFEENPINASGVDAKAILSARLSKSRRLENLIAQLPGEKKNGLFGNLIALSLGLTPNFKSNFDLAEDAKLQLSKDTYDDDLDNLLAQIGDQYADLFLAAKNLSDAILLSDILRVNTEITKAPLSASMIKRYDEHHQDLTLLKALVRQQLPEKYKEIFFDQSKNGYAGYIDGGASQEEFYKFIKPILEKMDGTEELLVKLNREDLLRKQRTFDNGSIPHQIHLGELHAILRRQEDFYPFLKDNREKIEKILTFRIPYYVGPLARGNSRFAWMTRKSEETITPWNFEEVVDKGASAQSFIERMTNFDKNLPNEKVLPKHSLLYEYFTVYNELTKVKYVTEGMRKPAFLSGEQKKAIVDLLFKTNRKVTVKQLKEDYFKKIECFDSVEISGVEDRFNASLGTYHDLLKIIKDKDFLDNEENEDILEDIVLTLTLFEDREMIEERLKTYAHLFDDKVMKQLKRRRYTGWGRLSRKLINGIRDKQSGKTILDFLKSDGFANRNFMQLIHDDSLTFKEDIQKAQVSGQGDSLHEHIANLAGSPAIKKGILQTVKVVDELVKVMGRHKPENIVIEMARENQTTQKGQKNSRERMKRIEEGIKELGSQILKEHPVENTQLQNEKLYLYYLQNGRDMYVDQELDINRLSDYDVDHIVPQSFLKDDSIDNKVLTRSDKNRGKSDNVPSEEVVKKMKNYWRQLLNAKLITQRKFDNLTKAERGGLSELDKAGFIKRQLVETRQITKHVAQILDSRMNTKYDENDKLIREVKVITLKSKLVSDFRKDFQFYKVREINNYHHAHDAYLNAVVGTALIKKYPKLESEFVYGDYKVYDVRKMIAKSEQEGADKRTADGSEFESPKKKRKV

SEQ ID NO: 239 - protein, 1302 aa, synthetic construct
  REGION 1..1302: note = Cas12c1 polypeptide sequence
MQTKKTHLHLISAKASRKYRRTIACLSDTAKKDLERRKQSGAADPAQELSCLKTIKFKLEVPEGSKLPSFDRISQIYNALETIEKGSLSYLLFALILSGFRIFPNSSAAKTFASSSCYKNDQFASQIKEIFGEMVKNFIPSELESILKKGRRKNNKDWTEENIKRVLNSEFGRKNSEGSSALFDSFLSKFSQELFRKFDSWNEVNKKYLEAAELLDSMLASYGPFDSVCKMIGDSDSRNSLPDKSTIAFTNNAEITVDIESSVMPYMAIAALLREYRQSKSKAAPVAYVQSHLTTTNGNGLSWFFKFGLDLIRKAPVSSKQSTSDGSKSLQELFSVPDDKLDGLKFIKEACEALPEASLLCGEKGELLGYQDFRTSFAGHIDSWVANYVNRLFELIELVNQLPESIKLPSILTQKNHNLVASLGLQEAEVSHSLELFEGLVKNVRQTLKKLAGIDISSSPNEQDIKEFYAFSDVLNRLGSIRNQIENAVQTAKKDKIDLESAIEWKEWKKLKKLPKLNGLGGGVPKQQELLDKALESVKQIRHYQRIDFERVIQWAVNEHCLETVPKFLVDAEKKKINKESSTDFAAKENAVRFLLEGIGAAARGKTDSVSKAAYNWFVVNNFLAKKDLNRYFINCQGCIYKPPYSKRRSLAFALRSDNKDTIEVVWEKFETFYKEISKEIEKFNIFSQEFQTFLHLENLRMKLLLRRIQKPIPAEIAFFSLPQEYYDSLPPNVAFLALNQEITPSEYITQFNLYSSFLNGNLILLRRSRSYLRAKFSWVGNSKLIYAAKEARLWKIPNAYWKSDEWKMILDSNVLVFDKAGNVLPAPTLKKVCEREGDLRLFYPLLRQLPHDWCYRNPFVKSVGREKNVIEVNKEGEPKVASALPGSLFRLIGPAPFKSLLDDCFFNPLDKDLRECMLIVDQEISQKVEAQKVEASLESCTYSIAVPIRYHLEEPKVSNQFENVLAIDQGEAGLAYAVFSLKSIGEAETKPIAVGTIRIPSIRRLIHSVSTYRKKKQRLQNFKQNYDSTAFIMRENVTGDVCAKIVGLMKEFNAFPVLEYDVKNLESGSRQLSAVYKAVNSHFLYFKEPGRDALRKQLWYGGDSWTIDGIEIVTRERKEDGKEGVEKIVPLKVFPGRSVSARFTSKTCSCCGRNVFDWLFTEKKAKTNKKFNVNSKGELTTADGVIQLFEADRSKGPKFYARRKERTPLTKPIAKGSYSLEEIERRVRTNLRRAPKSKQSRDTSQSQYFCVYKDCALHFSGMQADENAAINIGRRFLTALRKNRRSDFPSNVKISDRLLDN

SEQ ID NO: 240 - protein, 1218 aa, synthetic construct
  REGION 1..1218: note = Cas12c2 polypeptide sequence
MTKHSIPLHAFRNSGADARKWKGRIALLAKRGKETMRTLQFPLEMSEPEAAAINTTPFAVAYNAIEGTGKGTLFDYWAKLHLAGFRFFPSGGAATIFRQQAVFEDASWNAAFCQQSGKDWPWLVPSKLYERFTKAPREVAKKDGSKKSIEFTQENVANESHVSLVGASITDKTPEDQKEFFLKMAGALAEKFDSWKSANEDRIVAMKVIDEFLKSEGLHLPSLENIAVKCSVETKPDNATVAWHDAPMSGVQNLAIGVFATCASRIDNIYDLNGGKLSKLIQESATTPNVTALSWLFGKGLEYFRTTDIDTIMQDFNIPASAKESIKPLVESAQAIPTMTVLGKKNYAPFRPNFGGKIDSWIANYASRLMLLNDILEQIEPGFELPQALLDNETLMSGIDMTGDELKELIEAVYAWVDAAKQGLATLLGRGGNVDDAVQTFEQFSAMMDTLNGTLNTISARYVRAVEMAGKDEARLEKLIECKFDIPKWCKSVPKLVGISGGLPKVEEEIKVMNAAFKDVRARMFVRFEEIAAYVASKGAGMDVYDALEKRELEQIKKLKSAVPERAHIQAYRAVLHRIGRAVQNCSEKTKQLFSSKVIEMGVFKNPSHLNNFIFNQKGAIYRSPFDRSRHAPYQLHADKLLKNDWLELLAEISATLMASESTEQMEDALRLERTRLQLQLSGLPDWEYPASLAKPDIEVEIQTALKMQLAKDTVTSDVLQRAFNLYSSVLSGLTFKLLRRSFSLKMRFSVADTTQLIYVPKVCDWAIPKQYLQAEGEIGIAARVVTESSPAKMVTEVEMKEPKALGHFMQQAPHDWYFDASLGGTQVAGRIVEKGKEVGKERKLVGYRMRGNSAYKTVLDKSLVGNTELSQCSMIIEIPYTQTVDADFRAQVQAGLPKVSINLPVKETITASNKDEQMLFDRFVAIDLGERGLGYAVFDAKTLELQESGHRPIKAITNLLNRTHHYEQRPNQRQKFQAKFNVNLSELRENTVGDVCHQINRICAYYNAFPVLEYMVPDRLDKQLKSVYESVTNRYIWSSTDAHKSARVQFWLGGETWEHPYLKSAKDKKPLVLSPGRGASGKGTSQTCSCCGRNPFDLIKDMKPRAKIAVVDGKAKLENSELKLFERNLESKDDMLARRHRNERAGMEQPLTPGNYTVDEIKALLRANLRRAPKNRRTKDTTVSEYHCVFSDCGKTMHADENAAVNIGGKFIADIEK

SEQ ID NO: 241 - protein, 1252 aa, Oleiphilus sp.
  REGION 1..1252: note = MISC_FEATURE - OspCas12c polypeptide sequence
MTKLRHRQKKLTHDWAGSKKREVLGSNGKLQNPLLMPVKKGQVTEFRKAFSAYARATKGEMTDGRKNMFTHSFEPFKTKPSLHQCELADKAYQSLHSYLPGSLAHFLLSAHALGFRIFSKSGEATAFQASSKIEAYESKLASELACVDLSIQNLTISTLFNALTTSVRGKGEETSADPLIARFYTLLTGKPLSRDTQGPERDLAEVISRKIASSFGTWKEMTANPLQSLQFFEEELHALDANVSLSPAFDVLIKMNDLQGDLKNRTIVFDPDAPVFEYNAEDPADIIIKLTARYAKEAVIKNQNVGNYVKNAITTTNANGLGWLLNKGLSLLPVSTDDELLEFIGVERSHPSCHALIELIAQLEAPELFEKNVFSDTRSEVQGMIDSAVSNHIARLSSSRNSLSMDSEELERLIKSFQIHTPHCSLFIGAQSLSQQLESLPEALQSGVNSADILLGSTQYMLTNSLVEESIATYQRTLNRINYLSGVAGQINGAIKRKAIDGEKIHLPAAWSELISLPFIGQPVIDVESDLAHLKNQYQTLSNEFDTLISALQKNFDLNFNKALLNRTQHFEAMCRSTKKNALSKPEIVSYRDLLARLTSCLYRGSLVLRRAGIEVLKKHKIFESNSELREHVHERKHFVFVSPLDRKAKKLLRLTDSRPDLLHVIDEILQHDNLENKDRESLWLVRSGYLLAGLPDQLSSSFINLPIITQKGDRRLIDLIQYDQINRDAFVMLVTSAFKSNLSGLQYRANKQSFVVTRTLSPYLGSKLVYVPKDKDWLVPSQMFEGRFADILQSDYMVWKDAGRLCVIDTAKHLSNIKKSVFSSEEVLAFLRELPHRTFIQTEVRGLGVNVDGIAFNNGDIPSLKTFSNCVQVKVSRTNTSLVQTLNRWFEGGKVSPPSIQFERAYYKKDDQIHEDAAKRKIRFQMPATELVHASDDAGWTPSYLLGIDPGEYGMGLSLVSINNGEVLDSGFIHINSLINFASKKSNHQTKVVPRQQYKSPYANYLEQSKDSAAGDIAHILDRLIYKLNALPVFEALSGNSQSAADQVWTKVLSFYTWGDNDAQNSIRKQHWFGASHWDIKGMLRQPPTEKKPKPYIAFPGSQVSSYGNSQRCSCCGRNPIEQLREMAKDTSIKELKIRNSEIQLFDGTIKLFNPDPSTVIERRRHNLGPSRIPVADRTFKNISPSSLEFKELITIVSRSIRHSPEFIAKKRGIGSEYFCAYSDCNSSLNSEANAAANVAQKFQKQLFFEL

SEQ ID NO: 242 - protein, 767 aa, synthetic construct
  REGION 1..767: note = Cas12g1 polypeptide sequence
MAQASSTPAVSPRPRPRYREERTLVRKLLPRPGQSKQEFRENVKKLRKAFLQFNADVSGVCQWAIQFRPRYGKPAEPTETFWKFFLEPETSLPPNDSRSPEFRRLQAFEAAAGINGAAALDDPAFTNELRDSILAVASRPKTKEAQRLFSRLKDYQPAHRMILAKVAAEWIESRYRRAHQNWERNYEEWKKEKQEWEQNHPELTPEIREAFNQIFQQLEVKEKRVRICPAARLLQNKDNCQYAGKNKHSVLCNQFNEFKKNHLQGKAIKFFYKDAEKYLRCGLQSLKPNVQGPFREDWNKYLRYMNLKEETLRGKNGGRLPHCKNLGQECEFNPHTALCKQYQQQLSSRPDLVQHDELYRKWRREYWREPRKPVFRYPSVKRHSIAKIFGENYFQADFKNSVVGLRLDSMPAGQYLEFAFAPWPRNYRPQPGETEISSVHLHFVGTRPRIGFRFRVPHKRSRFDCTQEELDELRSRTFPRKAQDQKFLEAARKRLLETFPGNAEQELRLLAVDLGTDSARAAFFIGKTFQQAFPLKIVKIEKLYEQWPNQKQAGDRRDASSKQPRPGLSRDHVGRHLQKMRAQASEIAQKRQELTGTPAPETTTDQAAKKATLQPFDLRGLTVHTARMIRDWARLNARQIIQLAEENQVDLIVLESLRGFRPPGYENLDQEKKRRVAFFAHGRIRRKVTEKAVERGMRVVTVPYLASSKVCAECRKKQKDNKQWEKNKKRGLFKCEGCGSQAQVDENAARVLGRVFWGEIELPTAIP

SEQ ID NO: 243 - protein, 870 aa, synthetic construct
  REGION 1..870: note = Cas12h1 polypeptide sequence
MKVHEIPRSQLLKIKQYEGSFVEWYRDLQEDRKKFASLLFRWAAFGYAAREDDGATYISPSQALLERRLLLGDAEDVAIKFLDVLFKGGAPSSSCYSLFYEDFALRDKAKYSGAKREFIEGLATMPLDKIIERIRQDEQLSKIPAEEWLILGAEYSPEEIWEQVAPRIVNVDRSLGKQLRERLGIKCRRPHDAGYCKILMEVVARQLRSHNETYHEYLNQTHEMKTKVANNLTNEFDLVCEFAEVLEEKNYGLGWYVLWQGVKQALKEQKKPTKIQIAVDQLRQPKFAGLLTAKWRALKGAYDTWKLKKRLEKRKAFPYMPNWDNDYQIPVGLTGLGVFTLEVKRTEVVVDLKEHGKLFCSHSHYFGDLTAEKHPSRYHLKFRHKLKLRKRDSRVEPTIGPWIEAALREITIQKKPNGVFYLGLPYALSHGIDNFQIAKRFFSAAKPDKEVINGLPSEMVVGAADLNLSNIVAPVKARIGKGLEGPLHALDYGYGELIDGPKILTPDGPRCGELISLKRDIVEIKSAIKEFKACQREGLTMSEETTTWLSEVESPSDSPRCMIQSRIADTSRRLNSFKYQMNKEGYQDLAEALRLLDAMDSYNSLLESYQRMHLSPGEQSPKEAKFDTKRASFRDLLRRRVAHTIVEYFDDCDIVFFEDLDGPSDSDSRNNALVKLLSPRTLLLYIRQALEKRGIGMVEVAKDGTSQNNPISGHVGWRNKQNKSEIYFYEDKELLVMDADEVGAMNILCRGLNHSVCPYSFVTKAPEKKNDEKKEGDYGKRVKRFLKDRYGSSNVRFLVASMGFVTVTTKRPKDALVGKRLYYHGGELVTHDLHNRMKDEIKYLVEKEVLARRVSLSDSTIKSYKSFAHV

SEQ ID NO: 244 - protein, 1093 aa, synthetic construct
  REGION 1..1093: note = Cas12i1 polypeptide sequence
MSNKEKNASETRKAYTTKMIPRSHDRMKLLGNFMDYLMDGTPIFFELWNQFGGGIDRDIISGTANKDKISDDLLLAVNWFKVMPINSKPQGVSPSNLANLFQQYSGSEPDIQAQEYFASNFDTEKHQWKDMRVEYERLLAELQLSRSDMHHDLKLMYKEKCIGLSLSTAHYITSVMFGTGAKNNRQTKHQFYSKVIQLLEESTQINSVEQLASIILKAGDCDSYRKLRIRCSRKGATPSILKIVQDYELGTNHDDEVNVPSLIANLKEKLGRFEYECEWKCMEKIKAFLASKVGPYYLGSYSAMLENALSPIKGMTTKNCKFVLKQIDAKNDIKYENEPFGKIVEGFFDSPYFESDTNVKWVLHPHHIGESNIKTLWEDLNAIHSKYEEDIASLSEDKKEKRIKVYQGDVCQTINTYCEEVGKEAKTPLVQLLRYLYSRKDDIAVDKIIDGITFLSKKHKVEKQKINPVIQKYPSFNFGNNSKLLGKIISPKDKLKHNLKCNRNQVDNYIWIEIKVLNTKTMRWEKHHYALSSTRFLEEVYYPATSENPPDALAARFRTKTNGYEGKPALSAEQIEQIRSAPVGLRKVKKRQMRLEAARQQNLLPRYTWGKDFNINICKRGNNFEVTLATKVKKKKEKNYKVVLGYDANIVRKNTYAAIEAHANGDGVIDYNDLPVKPIESGFVTVESQVRDKSYDQLSYNGVKLLYCKPHVESRRSFLEKYRNGTMKDNRGNNIQIDFMKDFEAIADDETSLYYFNMKYCKLLQSSIRNHSSQAKEYREEIFELLRDGKLSVLKLSSLSNLSFVMFKVAKSLIGTYFGHLLKKPKNSKSDVKAPPITDEDKQKADPEMFALRLALEEKRLNKVKSKKEVIANKIVAKALELRDKYGPVLIKGENISDTTKKGKKSSTNSFLMDWLARGVANKVKEMVMMHQGLEFVEVNPNFTSHQDPFVHKNPENTFRARYSRCTPSELTEKNRKEILSFLSDKPSKRPTNAYYNEGAMAFLATYGLKKNDVLGVSLEKFKQIMANILHQRSEDQLLFPSRGGMFYLATYKLDADATSVNWNGKQFWVCNADLVAAYNVGLVDIQKDFKKK

SEQ ID NO: 245 - protein, 1054 aa, synthetic construct
  REGION 1..1054: note = Cas12i2 polypeptide sequence
MSSAIKSYKSVLRPNERKNQLLKSTIQCLEDGSAFFFKMLQGLFGGITPEIVRFSTEQEKQQQDIALWCAVNWFRPVSQDSLTHTIASDNLVEKFEEYYGGTASDAIKQYFSASIGESYYWNDCRQQYYDLCRELGVEVSDLTHDLEILCREKCLAVATESNQNNSIISVLFGTGEKEDRSVKLRITKKILEAISNLKEIPKNVAPIQEIILNVAKATKETFRQVYAGNLGAPSTLEKFIAKDGQKEFDLKKLQTDLKKVIRGKSKERDWCCQEELRSYVEQNTIQYDLWAWGEMFNKAHTALKIKSTRNYNFAKQRLEQFKEIQSLNNLLVVKKLNDFFDSEFFSGEETYTICVHHLGGKDLSKLYKAWEDDPADPENAIVVLCDDLKNNFKKEPIRNILRYIFTIRQECSAQDILAAAKYNQQLDRYKSQKANPSVLGNQGFTWTNAVILPEKAQRNDRPNSLDLRIWLYLKLRHPDGRWKKHHIPFYDTRFFQEIYAAGNSPVDTCQFRTPRFGYHLPKLTDQTAIRVNKKHVKAAKTEARIRLAIQQGTLPVSNLKITEISATINSKGQVRIPVKFDVGRQKGTLQIGDRFCGYDQNQTASHAYSLWEVVKEGQYHKELGCFVRFISSGDIVSITENRGNQFDQLSYEGLAYPQYADWRKKASKFVSLWQITKKNKKKEIVTVEAKEKFDAICKYQPRLYKFNKEYAYLLRDIVRGKSLVELQQIRQEIFRFIEQDCGVTRLGSLSLSTLETVKAVKGIIYSYFSTALNASKNNPISDEQRKEFDPELFALLEKLELIRTRKKKQKVERIANSLIQTCLENNIKFIRGEGDLSTTNNATKKKANSRSMDWLARGVFNKIRQLAPMHNITLFGCGSLYTSHQDPLVHRNPDKAMKCRWAAIPVKDIGDWVLRKLSQNLRAKNIGTGEYYHQGVKEFLSHYELQDLEEELLKWRSDRKSNIPCWVLQNRLAEKLGNKEAVVYIPVRGGRIYFATHKVATGAVSIVFDQKQVWVCNADHVAAANIALTVKGIGEQSSDEENPDGSRIKLQLTS

SEQ ID NO: 246 - protein, 4 aa, synthetic construct
  REGION 1..4: note = synthetic peptide sequence
GGGS

SEQ ID NO: 247 - protein, 5 aa, synthetic construct
  REGION 1..5: note = synthetic peptide sequence
GGGGS

SEQ ID NO: 248 - protein, 5 aa, synthetic construct
  REGION 1..5: note = synthetic peptide sequence
EAAAK

SEQ ID NO: 249 - protein, 16 aa, synthetic construct
  REGION 1..16: note = synthetic peptide sequence
SGSETPGTSESATPES

SEQ ID NO: 250 - protein, 6 aa, synthetic construct
  REGION 1..6: note = linker peptide sequence
GGSGGS

SEQ ID NO: 251 - protein, 20 aa, synthetic construct
  REGION 1..20: note = synthetic peptide sequence
GSSGSETPGTSESATPESSG

SEQ ID NO: 252 - DNA, 18 bp, synthetic construct
  misc_feature 1..18: note = synthetic oligonucleotide sequence
  source 1..18: mol_type = other DNA
ggaggctctggaggaagc

SEQ ID NO: 253 - DNA, 60 bp, synthetic construct
  misc_feature 1..60: note = synthetic oligonucleotide sequence
  source 1..60: mol_type = other DNA
ggctcttctggatctgaaacacctggcacaagcgagagcgccacccctgagagctctggc

SEQ ID NO: 254 - protein, 1129 aa, Alicyclobacillus acidiphilus
  REGION 1..1129: note = MISC_FEATURE - AacCas12b polypeptide sequence
MAVKSMKVKLRLDNMPEIRAGLWKLHTEVNAGVRYYTEWLSLLRQENLYRRSPNGDGEQECYKTAEECKAELLERLRARQVENGHCGPAGSDDELLQLARQLYELLVPQAIGAKGDAQQIARKFLSPLADKDAVGGLGIAKAGNKPRWVRMREAGEPGWEEEKAKAEARKSTDRTADVLRALADFGLKPLMRVYTDSDMSSVQWKPLRKGQAVRTWDRDMFQQAIERMMSWESWNQRVGEAYAKLVEQKSRFEQKNFVGQEHLVQLVNQLQQDMKEASHGLESKEQTAHYLTGRALRGSDKVFEKWEKLDPDAPFDLYDTEIKNVQRRNTRRFGSHDLFAKLAEPKYQALWREDASFLTRYAVYNSIVRKLNHAKMFATFTLPDATAHPIWTRFDKLGGNLHQYTFLFNEFGEGRHAIRFQKLLTVEDGVAKEVDDVTVPISMSAQLDDLLPRDPHELVALYFQDYGAEQHLAGEFGGAKIQYRRDQLNHLHARRGARDVYLNLSVRVQSQSEARGERRPPYAAVFRLVGDNHRAFVHFDKLSDYLAEHPDDGKLGSEGLLSGLRVMSVDLGLRTSASISVFRVARKDELKPNSEGRVPFCFPIEGNENLVAVHERSQLLKLPGETESKDLRAIREERQRTLRQLRTQLAYLRLLVRCGSEDVGRRERSWAKLIEQPMDANQMTPDWREAFEDELQKLKSLYGICGDREWTEAVYESVRRVWRHMGKQVRDWRKDVRSGERPKIRGYQKDVVGGNSIEQIEYLERQYKFLKSWSFFGKVSGQVIRAEKGSRFAITLREHIDHAKEDRLKKLADRIIMEALGYVYALDDERGKGKWVAKYPPCQLILLEELSEYQFNNDRPPSENNQLMQWSHRGVFQELLNQAQVHDLLVGTMYAAFSSRFDARTGAPGIRCRRVPARCAREQNPEPFPWWLNKFVAEHKLDGCPLRADDLIPTGEGEFFVSPFSAEEGDFHQIHADLNAAQNLQRRLWSDFDISQIRLRCDWGEVDGEPVLIPRTTGKRTADSYGNKVFYTKTGVTYYERERGKKRRKVFAQEELSEEEAELLVEADEAREKSVVLMRDPSGIINRGDWTRQKEFWSMVNQRIEGYLVKQIRSRVRLQESACENTGDI

SEQ ID NO: 255 - protein, 1140 aa, Bacillus hisashii
  REGION 1..1140: note = MISC_FEATURE - BhCas12b polypeptide sequence
MAPKKKRKVGIHGVPAAATRSFILKIEPNEEVKKGLWKTHEVLNHGIAYYMNILKLIRQEAIYEHHEQDPKNPKKVSKAEIQAELWDFVLKMQKCNSFTHEVDKDEVFNILRELYEELVPSSVEKKGEANQLSNKFLYPLVDPNSQSGKGTASSGRKPRWYNLKIAGDPSWEEEKKKWEEDKKKDPLAKILGKLAEYGLIPLFIPYTDSNEPIVKEIKWMEKSRNQSVRRLDKDMFIQALERFLSWESWNLKVKEEYEKVEKEYKTLEERIKEDIQALKALEQYEKERQEQLLRDTLNTNEYRLSKRGLRGWREIIQKWLKMDENEPSEKYLEVFKDYQRKHPREAGDYSVYEFLSKKENHFIWRNHPEYPYLYATFCEIDKKKKDAKQQATFTLADPINHPLWVRFEERSGSNLNKYRILTEQLHTEKLKKKLTVQLDRLIYPTESGGWEEKGKVDIVLLPSRQFYNQIFLDIEEKGKHAFTYKDESIKFPLKGTLGGARVQFDRDHLRRYPHKVESGNVGRIYFNMTVNIEPTESPVSKSLKIHRDDFPKVVNFKPKELTEWIKDSKGKKLKSGIESLEIGLRVMSIDLGQRQAAAASIFEVVDQKPDIEGKLFFPIKGTELYAVHRASFNIKLPGETLVKSREVLRKAREDNLKLMNQKLNFLRNVLHFQQFEDITEREKRVTKWISRQENSDVPLVYQDELIQIRELMYKPYKDWVAFLKQLHKRLEVEIGKEVKHWRKSLSDGRKGLYGISLKNIDEIDRTRKFLLRWSLRPTEPGEVRRLEPGQRFAIDQLNHLNALKEDRLKKMANTIIMHALGYCYDVRKKKWQAKNPACQIILFEDLSNYNPYEERSRFENSKLMKWSRREIPRQVALQGEIYGLQVGEVGAQFSSRFHAKTGSPGIRCSVVTKEKLQDNRFFKNLQREGRLTLDKIAVLKEGDLYPDKGGEKFISLSKDRKCVTTHADINAAQNLQKRFWTRTHGFYKVYCKAYQVDGQTVYIPESKDQKQKIIEEFGEGYFILKDGVYEWVNAGKLKIKKGSSKQSSSELVDSDILKDSFDLASELKGEKLMLYRDPSGNVFPSDKWMAAGVFFGKLERILISKLTNQYSISTIEDDSSKQSMKRPAATKKAGQAKKKK

SEQ ID NO: 256 - protein, 1108 aa, Bacillus thermoamylovorans
  REGION 1..1108: note = MISC_FEATURE - BTCas12b polypeptide sequence
MATRSFILKIEPNEEVKKGLWKTHEVLNHGIAYYMNILKLIRQEAIYEHHEQDPKNPKKVSKAEIQAELWDFVLKMQKCNSFTHEVDKDVVFNILRELYEELVPSSVEKKGEANQLSNKFLYPLVDPNSQSGKGTASSGRKPRWYNLKIAGDPSWEEEKKKWEEDKKKDPLAKILGKLAEYGLIPLFIPFTDSNEPIVKEIKWMEKSRNQSVRRLDKDMFIQALERFLSWESWNLKVKEEYEKVEKEHKTLEERIKEDIQAFKSLEQYEKERQEQLLRDTLNTNEYRLSKRGLRGWREIIQKWLKMDENEPSEKYLEVFKDYQRKHPREAGDYSVYEFLSKKENHFIWRNHPEYPYLYATFCEIDKKKKDAKQQATFTLADPINHPLWVRFEERSGSNLNKYRILTEQLHTEKLKKKLTVQLDRLIYPTESGGWEEKGKVDIVLLPSRQFYNQIFLDIEEKGKHAFTYKDESIKFPLKGTLGGARVQFDRDHLRRYPHKVESGNVGRIYFNMTVNIEPTESPVSKSLKIHRDDFPKFVNFKPKELTEWIKDSKGKKLKSGIESLEIGLRVMSIDLGQRQAAAASIFEVVDQKPDIEGKLFFPIKGTELYAVHRASFNIKLPGETLVKSREVLRKAREDNLKLMNQKLNFLRNVLHFQQFEDITEREKRVTKWISRQENSDVPLVYQDELIQIRELMYKPYKDWVAFLKQLHKRLEVEIGKEVKHWRKSLSDGRKGLYGISLKNIDEIDRTRKFLLRWSLRPTEPGEVRRLEPGQRFAIDQLNHLNALKEDRLKKMANTIIMHALGYCYDVRKKKWQAKNPACQIILFEDLSNYNPYEERSRFENSKLMKWSRREIPRQVALQGEIYGLQVGEVGAQFSSRFHAKTGSPGIRCSVVTKEKLQDNRFFKNLQREGRLTLDKIAVLKEGDLYPDKGGEKFISLSKDRKLVTTHADINAAQNLQKRFWTRTHGFYKVYCKAYQVDGQTVYIPESKDQKQKIIEEFGEGYFILKDGVYEWGNAGKLKIKKGSSKQSSSELVDSDILKDSFDLASELKGEKLMLYRDPSGNVFPSDKWMAAGVFFGKLERILISKLTNQYSISTIEDDSSKQSM

SEQ ID NO: 257 - protein, 1112 aa, Bacillus sp.
  REGION 1..1112: note = MISC_FEATURE - BvCas12b (Bacillus sp. V3-13) polypeptide sequence
MAIRSIKLKMKTNSGTDSIYLRKALWRTHQLINEGIAYYMNLLTLYRQEAIGDKTKEAYQAELINIIRNQQRNNGSSEEHGSDQEILALLRQLYELIIPSSIGESGDANQLGNKFLYPLVDPNSQSGKGTSNAGRKPRWKRLKEEGNPDWELEKKKDEERKAKDPTVKIFDNLNKYGLLPLFPLFTNIQKDIEWLPLGKRQSVRKWDKDMFIQAIERLLSWESWNRRVADEYKQLKEKTESYYKEHLTGGEEWIEKIRKFEKERNMELEKNAFAPNDGYFITSRQIRGWDRVYEKWSKLPESASPEELWKVVAEQQNKMSEGFGDPKVFSFLANRENRDIWRGHSERIYHIAAYNGLQKKLSRTKEQATFTLPDAIEHPLWIRYESPGGTNLNLFKLEEKQKKNYYVTLSKIIWPSEEKWIEKENIEIPLAPSIQFNRQIKLKQHVKGKQEISFSDYSSRISLDGVLGGSRIQFNRKYIKNHKELLGEGDIGPVFFNLVVDVAPLQETRNGRLQSPIGKALKVISSDFSKVIDYKPKELMDWMNTGSASNSFGVASLLEGMRVMSIDMGQRTSASVSIFEVVKELPKDQEQKLFYSINDTELFAIHKRSFLLNLPGEVVTKNNKQQRQERRKKRQFVRSQIRMLANVLRLETKKTPDERKKAIHKLMEIVQSYDSWTASQKEVWEKELNLLTNMAAFNDEIWKESLVELHHRIEPYVGQIVSKWRKGLSEGRKNLAGISMWNIDELEDTRRLLISWSKRSRTPGEANRIETDEPFGSSLLQHIQNVKDDRLKQMANLIIMTALGFKYDKEEKDRYKRWKETYPACQIILFENLNRYLFNLDRSRRENSRLMKWAHRSIPRTVSMQGEMFGLQVGDVRSEYSSRFHAKTGAPGIRCHALTEEDLKAGSNTLKRLIEDGFINESELAYLKKGDIIPSQGGELFVTLSKRYKKDSDNNELTVIHADINAAQNLQKRFWQQNSEVYRVPCQLARMGEDKLYIPKSQTETIKKYFGKGSFVKNNTEQEVYKWEKSEKMKIKTDTTFDLQDLDGFEDISKTIELAQEQQKKYLTMFRDPSGYFFNNETWRPQKEYWSIVNNIIKSCLKKKILSNKVEL

SEQ ID NO: 258 - DNA, 47 bp, synthetic construct
  misc_feature 1..47: note = 5'UTR oligonucleotide sequence
  source 1..47: mol_type = other DNA
gggaaataagagagaaaagaagagtaagaagaaatataagagccacc

SEQ ID NO: 259 - DNA, 101 bp, synthetic construct
  misc_feature 1..101: note = 3'UTR (TriLink standard UTR)polynucleotide sequence
  source 1..101: mol_type = other DNA
gctggagcctcggtggccatgcttcttgccccttgggcctccccccagcccctcctccccttcctgcacccgtacccccgtggtctttgaataaagtctga

SEQ ID NO: 260 - DNA, 3420 bp, Bacillus hisashii
  misc_feature 1..3420: note = bhCas12b (V4) polynucleotide sequence
  source 1..3420: mol_type = genomic DNA
atggccccaaagaagaagcggaaggtcggtatccacggagtcccagcagccgccaccagatccttcatcctgaagatcgagcccaacgaggaagtgaagaaaggcctctggaaaacccacgaggtgctgaaccacggaatcgcctactacatgaatatcctgaagctgatccggcaagaggccatctacgagcaccacgagcaggaccccaagaatcccaagaaggtgtccaaggccgagatccaggccgagctgtgggatttcgtgctgaagatgcagaagtgcaacagcttcacacacgaggtggacaaggacgaggtgttcaacatcctgagagagctgtacgaggaactggtgcccagcagcgtggaaaagaagggcgaagccaaccagctgagcaacaagtttctgtaccctctggtggaccccaacagccagtctggaaagggaacagccagcagcggcagaaagcccagatggtacaacctgaagattgccggcgatccctcctgggaagaagagaagaagaagtgggaagaagataagaaaaaggacccgctggccaagatcctgggcaagctggctgagtacggactgatccctctgttcatcccctacaccgacagcaacgagcccatcgtgaaagaaatcaagtggatggaaaagtcccggaaccagagcgtgcggcggctggataaggacatgttcattcaggccctggaacggttcctgagctgggagagctggaacctgaaagtgaaagaggaatacgagaaggtcgagaaagagtacaagaccctggaagagaggatcaaagaggacatccaggctctgaaggctctggaacagtatgagaaagagcggcaagaacagctgctgcgggacaccctgaacaccaacgagtaccggctgagcaagagaggccttagaggctggcgggaaatcatccagaaatggctgaaaatggacgagaacgagccctccgagaagtacctggaagtgttcaaggactaccagcggaagcaccctagagaggccggcgattacagcgtgtacgagttcctgtccaagaaagagaaccacttcatctggcggaatcaccctgagtacccctacctgtacgccaccttctgcgagatcgacaagaaaaagaaggacgccaagcagcaggccaccttcacactggccgatcctatcaatcaccctctgtgggtccgattcgaggaaagaagcggcagcaacctgaacaagtacagaatcctgaccgagcagctgcacaccgagaagctgaagaaaaagctgacagtgcagctggaccggctgatctaccctacagaatctggcggctgggaagagaagggcaaagtggacattgtgctgctgcccagccggcagttctacaaccagatcttcctggacatcgaggaaaagggcaagcacgccttcacctacaaggatgagagcatcaagttccctctgaagggcacactcggcggagccagagtgcagttcgacagagatcacctgagaagataccctcacaaggtggaaagcggcaacgtgggcagaatctacttcaacatgaccgtgaacatcgagcctacagagtccccagtgtccaagtctctgaagatccaccgggacgacttccccaaggtggtcaacttcaagcccaaagaactgaccgagtggatcaaggacagcaagggcaagaaactgaagtccggcatcgagtccctggaaatcggcctgagagtgatgagcatcgacctgggacagagacaggccgctgccgcctctattttcgaggtggtggatcagaagcccgacatcgaaggcaagctgtttttcccaatcaagggcaccgagctgtatgccgtgcacagagccagcttcaacatcaagctgcccggcgagacactggtcaagagcagagaagtgctgcggaaggccagagaggacaatctgaaactgatgaaccagaagctcaacttcctgcggaacgtgctgcacttccagcagttcgaggacatcaccgagagagagaagcgggtcaccaagtggatcagcagacaagagaacagcgacgtgcccctggtgtaccaggatgagctgatccagatccgcgagctgatgtacaagccttacaaggactgggtcgccttcctgaagcagctccacaagagactggaagtcgagatcggcaaagaagtgaagcactggcggaagtccctgagcgacggaagaaagggcctgtacggcatctccctgaagaacatcgacgagatcgatcggacccggaagttcctgctgagatggtccctgaggcctaccgaacctggcgaagtgcgtagactggaacccggccagagattcgccatcgaccagctgaatcacctgaacgccctgaaagaagatcggctgaagaagatggccaacaccatcatcatgcacgccctgggctactgctacgacgtgcggaagaagaaatggcaggctaagaaccccgcctgccagatcatcctgttcgaggatctgagcaactacaacccctacgaggaaaggtcccgcttcgagaacagcaagctcatgaagtggtccagacgcgagatccccagacaggttgcactgcagggcgagatctatggcctgcaagtgggagaagtgggcgctcagttcagcagcagattccacgccaagacaggcagccctggcatcagatgtagcgtcgtgaccaaagagaagctgcaggacaatcggttcttcaagaatctgcagagagagggcagactgaccctggacaaaatcgccgtgctgaaagagggcgatctgtacccagacaaaggcggcgagaagttcatcagcctgagcaaggatcggaagtgcgtgaccacacacgccgacatcaacgccgctcagaacctgcagaagcggttctggacaagaacccacggcttctacaaggtgtactgcaaggcctaccaggtggacggccagaccgtgtacatccctgagagcaaggaccagaagcagaagatcatcgaagagttcggcgagggctacttcattctgaaggacggggtgtacgaatgggtcaacgccggcaagctgaaaatcaagaagggcagctccaagcagagcagcagcgagctggtggatagcgacatcctgaaagacagcttcgacctggcctccgagctgaaaggcgaaaagctgatgctgtacagggaccccagcggcaatgtgttccccagcgacaaatggatggccgctggcgtgttcttcggaaagctggaacgcatcctgatcagcaagctgaccaaccagtactccatcagcaccatcgaggacgacagcagcaagcagtctatgaaaaggccggcggccacgaaaaaggccggccaggcaaaaaagaaaaag

SEQ ID NO: 261 - protein, 17 aa, synthetic construct
  REGION 1..17: note = synthetic peptide sequence
MAPKKKRKVGIHGVPAA

SEQ ID NO: 262 - DNA, 51 bp, synthetic construct
  misc_feature 1..51: note = synthetic oligonucleotide sequence
  source 1..51: mol_type = other DNA
atggccccaaagaagaagcggaaggtcggtatccacggagtcccagcagcc

SEQ ID NO: 263 - protein, 1554 aa, synthetic construct
  REGION 1..1554: note = 101 Cas9 TadAins 1015 polypeptide sequence
MDKKYSIGLAIGTNSVGWAVITDEYKVPSKKFKVLGNTDRHSIKKNLIGALLFDSGETAEATRLKRTARRRYTRRKNRICYLQEIFSNEMAKVDDSFFHRLEESFLVEEDKKHERHPIFGNIVDEVAYHEKYPTIYHLRKKLVDSTDKADLRLIYLALAHMIKFRGHFLIEGDLNPDNSDVDKLFIQLVQTYNQLFEENPINASGVDAKAILSARLSKSRRLENLIAQLPGEKKNGLFGNLIALSLGLTPNFKSNFDLAEDAKLQLSKDTYDDDLDNLLAQIGDQYADLFLAAKNLSDAILLSDILRVNTEITKAPLSASMIKRYDEHHQDLTLLKALVRQQLPEKYKEIFFDQSKNGYAGYIDGGASQEEFYKFIKPILEKMDGTEELLVKLNREDLLRKQRTFDNGSIPHQIHLGELHAILRRQEDFYPFLKDNREKIEKILTFRIPYYVGPLARGNSRFAWMTRKSEETITPWNFEEVVDKGASAQSFIERMTNFDKNLPNEKVLPKHSLLYEYFTVYNELTKVKYVTEGMRKPAFLSGEQKKAIVDLLFKTNRKVTVKQLKEDYFKKIECFDSVEISGVEDRFNASLGTYHDLLKIIKDKDFLDNEENEDILEDIVLTLTLFEDREMIEERLKTYAHLFDDKVMKQLKRRRYTGWGRLSRKLINGIRDKQSGKTILDFLKSDGFANRNFMQLIHDDSLTFKEDIQKAQVSGQGDSLHEHIANLAGSPAIKKGILQTVKVVDELVKVMGRHKPENIVIEMARENQTTQKGQKNSRERMKRIEEGIKELGSQILKEHPVENTQLQNEKLYLYYLQNGRDMYVDQELDINRLSDYDVDHIVPQSFLKDDSIDNKVLTRSDKNRGKSDNVPSEEVVKKMKNYWRQLLNAKLITQRKFDNLTKAERGGLSELDKAGFIKRQLVETRQITKHVAQILDSRMNTKYDENDKLIREVKVITLKSKLVSDFRKDFQFYKVREINNYHHAHDAYLNAVVGTALIKKYPKLESEFVYGDYKVGSSGSETPGTSESATPESSGSEVEFSHEYWMRHALTLAKRARDEREVPVGAVLVLNNRVIGEGWNRAIGLHDPTAHAEIMALRQGGLVMQNYRLIDATLYVTFEPCVMCAGAMIHSRIGRVVFGVRNAKTGAAGSLMDVLHYPGMNHRVEITEGILADECAALLCYFFRMPRQVFNAQKKAQSSTDYDVRKMIAKSEQEIGKATAKYFFYSNIMNFFKTEITLANGEIRKRPLIETNGETGEIVWDKGRDFATVRKVLSMPQVNIVKKTEVQTGGFSKESILPKRNSDKLIARKKDWDPKKYGGFDSPTVAYSVLVVAKVEKGKSKKLKSVKELLGITIMERSSFEKNPIDFLEAKGYKEVKKDLIIKLPKYSLFELENGRKRMLASAGELQKGNELALPSKYVNFLYLASHYEKLKGSPEDNEQKQLFVEQHKHYLDEIIEQISEFSKRVILADANLDKVLSAYNKHRDKPIREQAENIIHLFTLTNLGAPAAFKYFDTTIDRKRYTSTKEVLDATLIHQSITGLYETRIDLSQLGGD

SEQ ID NO: 264 - protein, 1554 aa, synthetic construct
  REGION 1..1554: note = 102 Cas9 TadAins 1022 polypeptide sequence
MDKKYSIGLAIGTNSVGWAVITDEYKVPSKKFKVLGNTDRHSIKKNLIGALLFDSGETAEATRLKRTARRRYTRRKNRICYLQEIFSNEMAKVDDSFFHRLEESFLVEEDKKHERHPIFGNIVDEVAYHEKYPTIYHLRKKLVDSTDKADLRLIYLALAHMIKFRGHFLIEGDLNPDNSDVDKLFIQLVQTYNQLFEENPINASGVDAKAILSARLSKSRRLENLIAQLPGEKKNGLFGNLIALSLGLTPNFKSNFDLAEDAKLQLSKDTYDDDLDNLLAQIGDQYADLFLAAKNLSDAILLSDILRVNTEITKAPLSASMIKRYDEHHQDLTLLKALVRQQLPEKYKEIFFDQSKNGYAGYIDGGASQEEFYKFIKPILEKMDGTEELLVKLNREDLLRKQRTFDNGSIPHQIHLGELHAILRRQEDFYPFLKDNREKIEKILTFRIPYYVGPLARGNSRFAWMTRKSEETITPWNFEEVVDKGASAQSFIERMTNFDKNLPNEKVLPKHSLLYEYFTVYNELTKVKYVTEGMRKPAFLSGEQKKAIVDLLFKTNRKVTVKQLKEDYFKKIECFDSVEISGVEDRFNASLGTYHDLLKIIKDKDFLDNEENEDILEDIVLTLTLFEDREMIEERLKTYAHLFDDKVMKQLKRRRYTGWGRLSRKLINGIRDKQSGKTILDFLKSDGFANRNFMQLIHDDSLTFKEDIQKAQVSGQGDSLHEHIANLAGSPAIKKGILQTVKVVDELVKVMGRHKPENIVIEMARENQTTQKGQKNSRERMKRIEEGIKELGSQILKEHPVENTQLQNEKLYLYYLQNGRDMYVDQELDINRLSDYDVDHIVPQSFLKDDSIDNKVLTRSDKNRGKSDNVPSEEVVKKMKNYWRQLLNAKLITQRKFDNLTKAERGGLSELDKAGFIKRQLVETRQITKHVAQILDSRMNTKYDENDKLIREVKVITLKSKLVSDFRKDFQFYKVREINNYHHAHDAYLNAVVGTALIKKYPKLESEFVYGDYKVYDVRKMIGSSGSETPGTSESATPESSGSEVEFSHEYWMRHALTLAKRARDEREVPVGAVLVLNNRVIGEGWNRAIGLHDPTAHAEIMALRQGGLVMQNYRLIDATLYVTFEPCVMCAGAMIHSRIGRVVFGVRNAKTGAAGSLMDVLHYPGMNHRVEITEGILADECAALLCYFFRMPRQVFNAQKKAQSSTDAKSEQEIGKATAKYFFYSNIMNFFKTEITLANGEIRKRPLIETNGETGEIVWDKGRDFATVRKVLSMPQVNIVKKTEVQTGGFSKESILPKRNSDKLIARKKDWDPKKYGGFDSPTVAYSVLVVAKVEKGKSKKLKSVKELLGITIMERSSFEKNPIDFLEAKGYKEVKKDLIIKLPKYSLFELENGRKRMLASAGELQKGNELALPSKYVNFLYLASHYEKLKGSPEDNEQKQLFVEQHKHYLDEIIEQISEFSKRVILADANLDKVLSAYNKHRDKPIREQAENIIHLFTLTNLGAPAAFKYFDTTIDRKRYTSTKEVLDATLIHQSITGLYETRIDLSQLGGD

SEQ ID NO: 265 - protein, 1554 aa, synthetic construct
  REGION 1..1554: note = 103 Cas9 TadAins 1029 polypeptide sequence
MDKKYSIGLAIGTNSVGWAVITDEYKVPSKKFKVLGNTDRHSIKKNLIGALLFDSGETAEATRLKRTARRRYTRRKNRICYLQEIFSNEMAKVDDSFFHRLEESFLVEEDKKHERHPIFGNIVDEVAYHEKYPTIYHLRKKLVDSTDKADLRLIYLALAHMIKFRGHFLIEGDLNPDNSDVDKLFIQLVQTYNQLFEENPINASGVDAKAILSARLSKSRRLENLIAQLPGEKKNGLFGNLIALSLGLTPNFKSNFDLAEDAKLQLSKDTYDDDLDNLLAQIGDQYADLFLAAKNLSDAILLSDILRVNTEITKAPLSASMIKRYDEHHQDLTLLKALVRQQLPEKYKEIFFDQSKNGYAGYIDGGASQEEFYKFIKPILEKMDGTEELLVKLNREDLLRKQRTFDNGSIPHQIHLGELHAILRRQEDFYPFLKDNREKIEKILTFRIPYYVGPLARGNSRFAWMTRKSEETITPWNFEEVVDKGASAQSFIERMTNFDKNLPNEKVLPKHSLLYEYFTVYNELTKVKYVTEGMRKPAFLSGEQKKAIVDLLFKTNRKVTVKQLKEDYFKKIECFDSVEISGVEDRFNASLGTYHDLLKIIKDKDFLDNEENEDILEDIVLTLTLFEDREMIEERLKTYAHLFDDKVMKQLKRRRYTGWGRLSRKLINGIRDKQSGKTILDFLKSDGFANRNFMQLIHDDSLTFKEDIQKAQVSGQGDSLHEHIANLAGSPAIKKGILQTVKVVDELVKVMGRHKPENIVIEMARENQTTQKGQKNSRERMKRIEEGIKELGSQILKEHPVENTQLQNEKLYLYYLQNGRDMYVDQELDINRLSDYDVDHIVPQSFLKDDSIDNKVLTRSDKNRGKSDNVPSEEVVKKMKNYWRQLLNAKLITQRKFDNLTKAERGGLSELDKAGFIKRQLVETRQITKHVAQILDSRMNTKYDENDKLIREVKVITLKSKLVSDFRKDFQFYKVREINNYHHAHDAYLNAVVGTALIKKYPKLESEFVYGDYKVYDVRKMIAKSEQEIGSSGSETPGTSESATPESSGSEVEFSHEYWMRHALTLAKRARDEREVPVGAVLVLNNRVIGEGWNRAIGLHDPTAHAEIMALRQGGLVMQNYRLIDATLYVTFEPCVMCAGAMIHSRIGRVVFGVRNAKTGAAGSLMDVLHYPGMNHRVEITEGILADECAALLCYFFRMPRQVFNAQKKAQSSTDGKATAKYFFYSNIMNFFKTEITLANGEIRKRPLIETNGETGEIVWDKGRDFATVRKVLSMPQVNIVKKTEVQTGGFSKESILPKRNSDKLIARKKDWDPKKYGGFDSPTVAYSVLVVAKVEKGKSKKLKSVKELLGITIMERSSFEKNPIDFLEAKGYKEVKKDLIIKLPKYSLFELENGRKRMLASAGELQKGNELALPSKYVNFLYLASHYEKLKGSPEDNEQKQLFVEQHKHYLDEIIEQISEFSKRVILADANLDKVLSAYNKHRDKPIREQAENIIHLFTLTNLGAPAAFKYFDTTIDRKRYTSTKEVLDATLIHQSITGLYETRIDLSQLGGD

SEQ ID NO: 266 - protein, 1554 aa, synthetic construct
  REGION 1..1554: note = 103 Cas9 TadAins 1040 polypeptide sequence
MDKKYSIGLAIGTNSVGWAVITDEYKVPSKKFKVLGNTDRHSIKKNLIGALLFDSGETAEATRLKRTARRRYTRRKNRICYLQEIFSNEMAKVDDSFFHRLEESFLVEEDKKHERHPIFGNIVDEVAYHEKYPTIYHLRKKLVDSTDKADLRLIYLALAHMIKFRGHFLIEGDLNPDNSDVDKLFIQLVQTYNQLFEENPINASGVDAKAILSARLSKSRRLENLIAQLPGEKKNGLFGNLIALSLGLTPNFKSNFDLAEDAKLQLSKDTYDDDLDNLLAQIGDQYADLFLAAKNLSDAILLSDILRVNTEITKAPLSASMIKRYDEHHQDLTLLKALVRQQLPEKYKEIFFDQSKNGYAGYIDGGASQEEFYKFIKPILEKMDGTEELLVKLNREDLLRKQRTFDNGSIPHQIHLGELHAILRRQEDFYPFLKDNREKIEKILTFRIPYYVGPLARGNSRFAWMTRKSEETITPWNFEEVVDKGASAQSFIERMTNFDKNLPNEKVLPKHSLLYEYFTVYNELTKVKYVTEGMRKPAFLSGEQKKAIVDLLFKTNRKVTVKQLKEDYFKKIECFDSVEISGVEDRFNASLGTYHDLLKIIKDKDFLDNEENEDILEDIVLTLTLFEDREMIEERLKTYAHLFDDKVMKQLKRRRYTGWGRLSRKLINGIRDKQSGKTILDFLKSDGFANRNFMQLIHDDSLTFKEDIQKAQVSGQGDSLHEHIANLAGSPAIKKGILQTVKVVDELVKVMGRHKPENIVIEMARENQTTQKGQKNSRERMKRIEEGIKELGSQILKEHPVENTQLQNEKLYLYYLQNGRDMYVDQELDINRLSDYDVDHIVPQSFLKDDSIDNKVLTRSDKNRGKSDNVPSEEVVKKMKNYWRQLLNAKLITQRKFDNLTKAERGGLSELDKAGFIKRQLVETRQITKHVAQILDSRMNTKYDENDKLIREVKVITLKSKLVSDFRKDFQFYKVREINNYHHAHDAYLNAVVGTALIKKYPKLESEFVYGDYKVYDVRKMIAKSEQEIGKATAKYFFYSGSSGSETPGTSESATPESSGSEVEFSHEYWMRHALTLAKRARDEREVPVGAVLVLNNRVIGEGWNRAIGLHDPTAHAEIMALRQGGLVMQNYRLIDATLYVTFEPCVMCAGAMIHSRIGRVVFGVRNAKTGAAGSLMDVLHYPGMNHRVEITEGILADECAALLCYFFRMPRQVFNAQKKAQSSTDNIMNFFKTEITLANGEIRKRPLIETNGETGEIVWDKGRDFATVRKVLSMPQVNIVKKTEVQTGGFSKESILPKRNSDKLIARKKDWDPKKYGGFDSPTVAYSVLVVAKVEKGKSKKLKSVKELLGITIMERSSFEKNPIDFLEAKGYKEVKKDLIIKLPKYSLFELENGRKRMLASAGELQKGNELALPSKYVNFLYLASHYEKLKGSPEDNEQKQLFVEQHKHYLDEIIEQISEFSKRVILADANLDKVLSAYNKHRDKPIREQAENIIHLFTLTNLGAPAAFKYFDTTIDRKRYTSTKEVLDATLIHQSITGLYETRIDLSQLGGD

SEQ ID NO: 267 - protein, 1554 aa, synthetic construct
  REGION 1..1554: note = 105 Cas9 TadAins 1068 polypeptide sequence
MDKKYSIGLAIGTNSVGWAVITDEYKVPSKKFKVLGNTDRHSIKKNLIGALLFDSGETAEATRLKRTARRRYTRRKNRICYLQEIFSNEMAKVDDSFFHRLEESFLVEEDKKHERHPIFGNIVDEVAYHEKYPTIYHLRKKLVDSTDKADLRLIYLALAHMIKFRGHFLIEGDLNPDNSDVDKLFIQLVQTYNQLFEENPINASGVDAKAILSARLSKSRRLENLIAQLPGEKKNGLFGNLIALSLGLTPNFKSNFDLAEDAKLQLSKDTYDDDLDNLLAQIGDQYADLFLAAKNLSDAILLSDILRVNTEITKAPLSASMIKRYDEHHQDLTLLKALVRQQLPEKYKEIFFDQSKNGYAGYIDGGASQEEFYKFIKPILEKMDGTEELLVKLNREDLLRKQRTFDNGSIPHQIHLGELHAILRRQEDFYPFLKDNREKIEKILTFRIPYYVGPLARGNSRFAWMTRKSEETITPWNFEEVVDKGASAQSFIERMTNFDKNLPNEKVLPKHSLLYEYFTVYNELTKVKYVTEGMRKPAFLSGEQKKAIVDLLFKTNRKVTVKQLKEDYFKKIECFDSVEISGVEDRFNASLGTYHDLLKIIKDKDFLDNEENEDILEDIVLTLTLFEDREMIEERLKTYAHLFDDKVMKQLKRRRYTGWGRLSRKLINGIRDKQSGKTILDFLKSDGFANRNFMQLIHDDSLTFKEDIQKAQVSGQGDSLHEHIANLAGSPAIKKGILQTVKVVDELVKVMGRHKPENIVIEMARENQTTQKGQKNSRERMKRIEEGIKELGSQILKEHPVENTQLQNEKLYLYYLQNGRDMYVDQELDINRLSDYDVDHIVPQSFLKDDSIDNKVLTRSDKNRGKSDNVPSEEVVKKMKNYWRQLLNAKLITQRKFDNLTKAERGGLSELDKAGFIKRQLVETRQITKHVAQILDSRMNTKYDENDKLIREVKVITLKSKLVSDFRKDFQFYKVREINNYHHAHDAYLNAVVGTALIKKYPKLESEFVYGDYKVYDVRKMIAKSEQEIGKATAKYFFYSNIMNFFKTEITLANGEIRKRPLIETNGEGSSGSETPGTSESATPESSGSEVEFSHEYWMRHALTLAKRARDEREVPVGAVLVLNNRVIGEGWNRAIGLHDPTAHAEIMALRQGGLVMQNYRLIDATLYVTFEPCVMCAGAMIHSRIGRVVFGVRNAKTGAAGSLMDVLHYPGMNHRVEITEGILADECAALLCYFFRMPRQVFNAQKKAQSSTDTGEIVWDKGRDFATVRKVLSMPQVNIVKKTEVQTGGFSKESILPKRNSDKLIARKKDWDPKKYGGFDSPTVAYSVLVVAKVEKGKSKKLKSVKELLGITIMERSSFEKNPIDFLEAKGYKEVKKDLIIKLPKYSLFELENGRKRMLASAGELQKGNELALPSKYVNFLYLASHYEKLKGSPEDNEQKQLFVEQHKHYLDEIIEQISEFSKRVILADANLDKVLSAYNKHRDKPIREQAENIIHLFTLTNLGAPAAFKYFDTTIDRKRYTSTKEVLDATLIHQSITGLYETRIDLSQLGGD

SEQ ID NO: 268 - protein, 1554 aa, synthetic construct
  REGION 1..1554: note = 106 Cas9 TadAins 1247 polypeptide sequence
MDKKYSIGLAIGTNSVGWAVITDEYKVPSKKFKVLGNTDRHSIKKNLIGALLFDSGETAEATRLKRTARRRYTRRKNRICYLQEIFSNEMAKVDDSFFHRLEESFLVEEDKKHERHPIFGNIVDEVAYHEKYPTIYHLRKKLVDSTDKADLRLIYLALAHMIKFRGHFLIEGDLNPDNSDVDKLFIQLVQTYNQLFEENPINASGVDAKAILSARLSKSRRLENLIAQLPGEKKNGLFGNLIALSLGLTPNFKSNFDLAEDAKLQLSKDTYDDDLDNLLAQIGDQYADLFLAAKNLSDAILLSDILRVNTEITKAPLSASMIKRYDEHHQDLTLLKALVRQQLPEKYKEIFFDQSKNGYAGYIDGGASQEEFYKFIKPILEKMDGTEELLVKLNREDLLRKQRTFDNGSIPHQIHLGELHAILRRQEDFYPFLKDNREKIEKILTFRIPYYVGPLARGNSRFAWMTRKSEETITPWNFEEVVDKGASAQSFIERMTNFDKNLPNEKVLPKHSLLYEYFTVYNELTKVKYVTEGMRKPAFLSGEQKKAIVDLLFKTNRKVTVKQLKEDYFKKIECFDSVEISGVEDRFNASLGTYHDLLKIIKDKDFLDNEENEDILEDIVLTLTLFEDREMIEERLKTYAHLFDDKVMKQLKRRRYTGWGRLSRKLINGIRDKQSGKTILDFLKSDGFANRNFMQLIHDDSLTFKEDIQKAQVSGQGDSLHEHIANLAGSPAIKKGILQTVKVVDELVKVMGRHKPENIVIEMARENQTTQKGQKNSRERMKRIEEGIKELGSQILKEHPVENTQLQNEKLYLYYLQNGRDMYVDQELDINRLSDYDVDHIVPQSFLKDDSIDNKVLTRSDKNRGKSDNVPSEEVVKKMKNYWRQLLNAKLITQRKFDNLTKAERGGLSELDKAGFIKRQLVETRQITKHVAQILDSRMNTKYDENDKLIREVKVITLKSKLVSDFRKDFQFYKVREINNYHHAHDAYLNAVVGTALIKKYPKLESEFVYGDYKVYDVRKMIAKSEQEIGKATAKYFFYSNIMNFFKTEITLANGEIRKRPLIETNGETGEIVWDKGRDFATVRKVLSMPQVNIVKKTEVQTGGFSKESILPKRNSDKLIARKKDWDPKKYGGFDSPTVAYSVLVVAKVEKGKSKKLKSVKELLGITIMERSSFEKNPIDFLEAKGYKEVKKDLIIKLPKYSLFELENGRKRMLASAGELQKGNELALPSKYVNFLYLASHYEKLKGGSSGSETPGTSESATPESSGSEVEFSHEYWMRHALTLAKRARDEREVPVGAVLVLNNRVIGEGWNRAIGLHDPTAHAEIMALRQGGLVMQNYRLIDATLYVTFEPCVMCAGAMIHSRIGRVVFGVRNAKTGAAGSLMDVLHYPGMNHRVEITEGILADECAALLCYFFRMPRQVFNAQKKAQSSTDSPEDNEQKQLFVEQHKHYLDEIIEQISEFSKRVILADANLDKVLSAYNKHRDKPIREQAENIIHLFTLTNLGAPAAFKYFDTTIDRKRYTSTKEVLDATLIHQSITGLYETRIDLSQLGGD

SEQ ID NO: 269 - protein, 1554 aa, synthetic construct
  REGION 1..1554: note = 107 Cas9 TadAins 1054 polypeptide sequence
MDKKYSIGLAIGTNSVGWAVITDEYKVPSKKFKVLGNTDRHSIKKNLIGALLFDSGETAEATRLKRTARRRYTRRKNRICYLQEIFSNEMAKVDDSFFHRLEESFLVEEDKKHERHPIFGNIVDEVAYHEKYPTIYHLRKKLVDSTDKADLRLIYLALAHMIKFRGHFLIEGDLNPDNSDVDKLFIQLVQTYNQLFEENPINASGVDAKAILSARLSKSRRLENLIAQLPGEKKNGLFGNLIALSLGLTPNFKSNFDLAEDAKLQLSKDTYDDDLDNLLAQIGDQYADLFLAAKNLSDAILLSDILRVNTEITKAPLSASMIKRYDEHHQDLTLLKALVRQQLPEKYKEIFFDQSKNGYAGYIDGGASQEEFYKFIKPILEKMDGTEELLVKLNREDLLRKQRTFDNGSIPHQIHLGELHAILRRQEDFYPFLKDNREKIEKILTFRIPYYVGPLARGNSRFAWMTRKSEETITPWNFEEVVDKGASAQSFIERMTNFDKNLPNEKVLPKHSLLYEYFTVYNELTKVKYVTEGMRKPAFLSGEQKKAIVDLLFKTNRKVTVKQLKEDYFKKIECFDSVEISGVEDRFNASLGTYHDLLKIIKDKDFLDNEENEDILEDIVLTLTLFEDREMIEERLKTYAHLFDDKVMKQLKRRRYTGWGRLSRKLINGIRDKQSGKTILDFLKSDGFANRNFMQLIHDDSLTFKEDIQKAQVSGQGDSLHEHIANLAGSPAIKKGILQTVKVVDELVKVMGRHKPENIVIEMARENQTTQKGQKNSRERMKRIEEGIKELGSQILKEHPVENTQLQNEKLYLYYLQNGRDMYVDQELDINRLSDYDVDHIVPQSFLKDDSIDNKVLTRSDKNRGKSDNVPSEEVVKKMKNYWRQLLNAKLITQRKFDNLTKAERGGLSELDKAGFIKRQLVETRQITKHVAQILDSRMNTKYDENDKLIREVKVITLKSKLVSDFRKDFQFYKVREINNYHHAHDAYLNAVVGTALIKKYPKLESEFVYGDYKVYDVRKMIAKSEQEIGKATAKYFFYSNIMNFFKTEITLANGSSGSETPGTSESATPESSGSEVEFSHEYWMRHALTLAKRARDEREVPVGAVLVLNNRVIGEGWNRAIGLHDPTAHAEIMALRQGGLVMQNYRLIDATLYVTFEPCVMCAGAMIHSRIGRVVFGVRNAKTGAAGSLMDVLHYPGMNHRVEITEGILADECAALLCYFFRMPRQVFNAQKKAQSSTDGEIRKRPLIETNGETGEIVWDKGRDFATVRKVLSMPQVNIVKKTEVQTGGFSKESILPKRNSDKLIARKKDWDPKKYGGFDSPTVAYSVLVVAKVEKGKSKKLKSVKELLGITIMERSSFEKNPIDFLEAKGYKEVKKDLIIKLPKYSLFELENGRKRMLASAGELQKGNELALPSKYVNFLYLASHYEKLKGSPEDNEQKQLFVEQHKHYLDEIIEQISEFSKRVILADANLDKVLSAYNKHRDKPIREQAENIIHLFTLTNLGAPAAFKYFDTTIDRKRYTSTKEVLDATLIHQSITGLYETRIDLSQLGGD

SEQ ID NO: 270 - protein, 1554 aa, synthetic construct
  REGION 1..1554: note = 108 Cas9 TadAins 1026 polypeptide sequence
MDKKYSIGLAIGTNSVGWAVITDEYKVPSKKFKVLGNTDRHSIKKNLIGALLFDSGETAEATRLKRTARRRYTRRKNRICYLQEIFSNEMAKVDDSFFHRLEESFLVEEDKKHERHPIFGNIVDEVAYHEKYPTIYHLRKKLVDSTDKADLRLIYLALAHMIKFRGHFLIEGDLNPDNSDVDKLFIQLVQTYNQLFEENPINASGVDAKAILSARLSKSRRLENLIAQLPGEKKNGLFGNLIALSLGLTPNFKSNFDLAEDAKLQLSKDTYDDDLDNLLAQIGDQYADLFLAAKNLSDAILLSDILRVNTEITKAPLSASMIKRYDEHHQDLTLLKALVRQQLPEKYKEIFFDQSKNGYAGYIDGGASQEEFYKFIKPILEKMDGTEELLVKLNREDLLRKQRTFDNGSIPHQIHLGELHAILRRQEDFYPFLKDNREKIEKILTFRIPYYVGPLARGNSRFAWMTRKSEETITPWNFEEVVDKGASAQSFIERMTNFDKNLPNEKVLPKHSLLYEYFTVYNELTKVKYVTEGMRKPAFLSGEQKKAIVDLLFKTNRKVTVKQLKEDYFKKIECFDSVEISGVEDRFNASLGTYHDLLKIIKDKDFLDNEENEDILEDIVLTLTLFEDREMIEERLKTYAHLFDDKVMKQLKRRRYTGWGRLSRKLINGIRDKQSGKTILDFLKSDGFANRNFMQLIHDDSLTFKEDIQKAQVSGQGDSLHEHIANLAGSPAIKKGILQTVKVVDELVKVMGRHKPENIVIEMARENQTTQKGQKNSRERMKRIEEGIKELGSQILKEHPVENTQLQNEKLYLYYLQNGRDMYVDQELDINRLSDYDVDHIVPQSFLKDDSIDNKVLTRSDKNRGKSDNVPSEEVVKKMKNYWRQLLNAKLITQRKFDNLTKAERGGLSELDKAGFIKRQLVETRQITKHVAQILDSRMNTKYDENDKLIREVKVITLKSKLVSDFRKDFQFYKVREINNYHHAHDAYLNAVVGTALIKKYPKLESEFVYGDYKVYDVRKMIAKSEGSSGSETPGTSESATPESSGSEVEFSHEYWMRHALTLAKRARDEREVPVGAVLVLNNRVIGEGWNRAIGLHDPTAHAEIMALRQGGLVMQNYRLIDATLYVTFEPCVMCAGAMIHSRIGRVVFGVRNAKTGAAGSLMDVLHYPGMNHRVEITEGILADECAALLCYFFRMPRQVFNAQKKAQSSTDQEIGKATAKYFFYSNIMNFFKTEITLANGEIRKRPLIETNGETGEIVWDKGRDFATVRKVLSMPQVNIVKKTEVQTGGFSKESILPKRNSDKLIARKKDWDPKKYGGFDSPTVAYSVLVVAKVEKGKSKKLKSVKELLGITIMERSSFEKNPIDFLEAKGYKEVKKDLIIKLPKYSLFELENGRKRMLASAGELQKGNELALPSKYVNFLYLASHYEKLKGSPEDNEQKQLFVEQHKHYLDEIIEQISEFSKRVILADANLDKVLSAYNKHRDKPIREQAENIIHLFTLTNLGAPAAFKYFDTTIDRKRYTSTKEVLDATLIHQSITGLYETRIDLSQLGGD

SEQ ID NO: 271 - protein, 1540 aa, synthetic construct
  REGION 1..1540: note = 109 Cas9 TadAins 768 polypeptide sequence
MDKKYSIGLAIGTNSVGWAVITDEYKVPSKKFKVLGNTDRHSIKKNLIGALLFDSGETAEATRLKRTARRRYTRRKNRICYLQEIFSNEMAKVDDSFFHRLEESFLVEEDKKHERHPIFGNIVDEVAYHEKYPTIYHLRKKLVDSTDKADLRLIYLALAHMIKFRGHFLIEGDLNPDNSDVDKLFIQLVQTYNQLFEENPINASGVDAKAILSARLSKSRRLENLIAQLPGEKKNGLFGNLIALSLGLTPNFKSNFDLAEDAKLQLSKDTYDDDLDNLLAQIGDQYADLFLAAKNLSDAILLSDILRVNTEITKAPLSASMIKRYDEHHQDLTLLKALVRQQLPEKYKEIFFDQSKNGYAGYIDGGASQEEFYKFIKPILEKMDGTEELLVKLNREDLLRKQRTFDNGSIPHQIHLGELHAILRRQEDFYPFLKDNREKIEKILTFRIPYYVGPLARGNSRFAWMTRKSEETITPWNFEEVVDKGASAQSFIERMTNFDKNLPNEKVLPKHSLLYEYFTVYNELTKVKYVTEGMRKPAFLSGEQKKAIVDLLFKTNRKVTVKQLKEDYFKKIECFDSVEISGVEDRFNASLGTYHDLLKIIKDKDFLDNEENEDILEDIVLTLTLFEDREMIEERLKTYAHLFDDKVMKQLKRRRYTGWGRLSRKLINGIRDKQSGKTILDFLKSDGFANRNFMQLIHDDSLTFKEDIQKAQVSGQGDSLHEHIANLAGSPAIKKGILQTVKVVDELVKVMGRHKPENIVIEMARENQGSSGSETPGTSESATPESSGSEVEFSHEYWMRHALTLAKRARDEREVPVGAVLVLNNRVIGEGWNRAIGLHDPTAHAEIMALRQGGLVMQNYRLIDATLYVTFEPCVMCAGAMIHSRIGRVVFGVRNAKTGAAGSLMDVLHYPGMNHRVEITEGILADECAALLCYFFRMPRTTQKGQKNSRERMKRIEEGIKELGSQILKEHPVENTQLQNEKLYLYYLQNGRDMYVDQELDINRLSDYDVDHIVPQSFLKDDSIDNKVLTRSDKNRGKSDNVPSEEVVKKMKNYWRQLLNAKLITQRKFDNLTKAERGGLSELDKAGFIKRQLVETRQITKHVAQILDSRMNTKYDENDKLIREVKVITLKSKLVSDFRKDFQFYKVREINNYHHAHDAYLNAVVGTALIKKYPKLESEFVYGDYKVYDVRKMIAKSEQEIGKATAKYFFYSNIMNFFKTEITLANGEIRKRPLIETNGETGEIVWDKGRDFATVRKVLSMPQVNIVKKTEVQTGGFSKESILPKRNSDKLIARKKDWDPKKYGGFDSPTVAYSVLVVAKVEKGKSKKLKSVKELLGITIMERSSFEKNPIDFLEAKGYKEVKKDLIIKLPKYSLFELENGRKRMLASAGELQKGNELALPSKYVNFLYLASHYEKLKGSPEDNEQKQLFVEQHKHYLDEIIEQISEFSKRVILADANLDKVLSAYNKHRDKPIREQAENIIHLFTLTNLGAPAAFKYFDTTIDRKRYTSTKEVLDATLIHQSITGLYETRIDLSQLGGD

SEQ ID NO: 272 - protein, 1540 aa, synthetic construct
  REGION 1..1540: note = 110.1 Cas9 TadAins 1250 polypeptide sequence
MDKKYSIGLAIGTNSVGWAVITDEYKVPSKKFKVLGNTDRHSIKKNLIGALLFDSGETAEATRLKRTARRRYTRRKNRICYLQEIFSNEMAKVDDSFFHRLEESFLVEEDKKHERHPIFGNIVDEVAYHEKYPTIYHLRKKLVDSTDKADLRLIYLALAHMIKFRGHFLIEGDLNPDNSDVDKLFIQLVQTYNQLFEENPINASGVDAKAILSARLSKSRRLENLIAQLPGEKKNGLFGNLIALSLGLTPNFKSNFDLAEDAKLQLSKDTYDDDLDNLLAQIGDQYADLFLAAKNLSDAILLSDILRVNTEITKAPLSASMIKRYDEHHQDLTLLKALVRQQLPEKYKEIFFDQSKNGYAGYIDGGASQEEFYKFIKPILEKMDGTEELLVKLNREDLLRKQRTFDNGSIPHQIHLGELHAILRRQEDFYPFLKDNREKIEKILTFRIPYYVGPLARGNSRFAWMTRKSEETITPWNFEEVVDKGASAQSFIERMTNFDKNLPNEKVLPKHSLLYEYFTVYNELTKVKYVTEGMRKPAFLSGEQKKAIVDLLFKTNRKVTVKQLKEDYFKKIECFDSVEISGVEDRFNASLGTYHDLLKIIKDKDFLDNEENEDILEDIVLTLTLFEDREMIEERLKTYAHLFDDKVMKQLKRRRYTGWGRLSRKLINGIRDKQSGKTILDFLKSDGFANRNFMQLIHDDSLTFKEDIQKAQVSGQGDSLHEHIANLAGSPAIKKGILQTVKVVDELVKVMGRHKPENIVIEMARENQTTQKGQKNSRERMKRIEEGIKELGSQILKEHPVENTQLQNEKLYLYYLQNGRDMYVDQELDINRLSDYDVDHIVPQSFLKDDSIDNKVLTRSDKNRGKSDNVPSEEVVKKMKNYWRQLLNAKLITQRKFDNLTKAERGGLSELDKAGFIKRQLVETRQITKHVAQILDSRMNTKYDENDKLIREVKVITLKSKLVSDFRKDFQFYKVREINNYHHAHDAYLNAVVGTALIKKYPKLESEFVYGDYKVYDVRKMIAKSEQEIGKATAKYFFYSNIMNFFKTEITLANGEIRKRPLIETNGETGEIVWDKGRDFATVRKVLSMPQVNIVKKTEVQTGGFSKESILPKRNSDKLIARKKDWDPKKYGGFDSPTVAYSVLVVAKVEKGKSKKLKSVKELLGITIMERSSFEKNPIDFLEAKGYKEVKKDLIIKLPKYSLFELENGRKRMLASAGELQKGNELALPSKYVNFLYLASHYEKLKGSPGSSGSETPGTSESATPESSGSEVEFSHEYWMRHALTLAKRARDEREVPVGAVLVLNNRVIGEGWNRAIGLHDPTAHAEIMALRQGGLVMQNYRLIDATLYVTFEPCVMCAGAMIHSRIGRVVFGVRNAKTGAAGSLMDVLHYPGMNHRVEITEGILADECAALLCYFFRMPREDNEQKQLFVEQHKHYLDEIIEQISEFSKRVILADANLDKVLSAYNKHRDKPIREQAENIIHLFTLTNLGAPAAFKYFDTTIDRKRYTSTKEVLDATLIHQSITGLYETRIDLSQLGGD

SEQ ID NO: 273 - protein, 1543 aa, synthetic construct
  REGION 1..1543: note = 110.2 Cas9 TadAins 1250 polypeptide sequence
MDKKYSIGLAIGTNSVGWAVITDEYKVPSKKFKVLGNTDRHSIKKNLIGALLFDSGETAEATRLKRTARRRYTRRKNRICYLQEIFSNEMAKVDDSFFHRLEESFLVEEDKKHERHPIFGNIVDEVAYHEKYPTIYHLRKKLVDSTDKADLRLIYLALAHMIKFRGHFLIEGDLNPDNSDVDKLFIQLVQTYNQLFEENPINASGVDAKAILSARLSKSRRLENLIAQLPGEKKNGLFGNLIALSLGLTPNFKSNFDLAEDAKLQLSKDTYDDDLDNLLAQIGDQYADLFLAAKNLSDAILLSDILRVNTEITKAPLSASMIKRYDEHHQDLTLLKALVRQQLPEKYKEIFFDQSKNGYAGYIDGGASQEEFYKFIKPILEKMDGTEELLVKLNREDLLRKQRTFDNGSIPHQIHLGELHAILRRQEDFYPFLKDNREKIEKILTFRIPYYVGPLARGNSRFAWMTRKSEETITPWNFEEVVDKGASAQSFIERMTNFDKNLPNEKVLPKHSLLYEYFTVYNELTKVKYVTEGMRKPAFLSGEQKKAIVDLLFKTNRKVTVKQLKEDYFKKIECFDSVEISGVEDRFNASLGTYHDLLKIIKDKDFLDNEENEDILEDIVLTLTLFEDREMIEERLKTYAHLFDDKVMKQLKRRRYTGWGRLSRKLINGIRDKQSGKTILDFLKSDGFANRNFMQLIHDDSLTFKEDIQKAQVSGQGDSLHEHIANLAGSPAIKKGILQTVKVVDELVKVMGRHKPENIVIEMARENQTTQKGQKNSRERMKRIEEGIKELGSQILKEHPVENTQLQNEKLYLYYLQNGRDMYVDQELDINRLSDYDVDHIVPQSFLKDDSIDNKVLTRSDKNRGKSDNVPSEEVVKKMKNYWRQLLNAKLITQRKFDNLTKAERGGLSELDKAGFIKRQLVETRQITKHVAQILDSRMNTKYDENDKLIREVKVITLKSKLVSDFRKDFQFYKVREINNYHHAHDAYLNAVVGTALIKKYPKLESEFVYGDYKVYDVRKMIAKSEQEIGKATAKYFFYSNIMNFFKTEITLANGEIRKRPLIETNGETGEIVWDKGRDFATVRKVLSMPQVNIVKKTEVQTGGFSKESILPKRNSDKLIARKKDWDPKKYGGFDSPTVAYSVLVVAKVEKGKSKKLKSVKELLGITIMERSSFEKNPIDFLEAKGYKEVKKDLIIKLPKYSLFELENGRKRMLASAGELQKGNELALPSKYVNFLYLASHYEKLKGSPGSSGSSGSETPGTSESATPESSGSEVEFSHEYWMRHALTLAKRARDEREVPVGAVLVLNNRVIGEGWNRAIGLHDPTAHAEIMALRQGGLVMQNYRLIDATLYVTFEPCVMCAGAMIHSRIGRVVFGVRNAKTGAAGSLMDVLHYPGMNHRVEITEGILADECAALLCYFFRMPREDNEQKQLFVEQHKHYLDEIIEQISEFSKRVILADANLDKVLSAYNKHRDKPIREQAENIIHLFTLTNLGAPAAFKYFDTTIDRKRYTSTKEVLDATLIHQSITGLYETRIDLSQLGGD

SEQ ID NO: 274 - protein, 1546 aa, synthetic construct
  REGION 1..1546: note = 110.3 Cas9 TadAins 1250 polypeptide sequence
MDKKYSIGLAIGTNSVGWAVITDEYKVPSKKFKVLGNTDRHSIKKNLIGALLFDSGETAEATRLKRTARRRYTRRKNRICYLQEIFSNEMAKVDDSFFHRLEESFLVEEDKKHERHPIFGNIVDEVAYHEKYPTIYHLRKKLVDSTDKADLRLIYLALAHMIKFRGHFLIEGDLNPDNSDVDKLFIQLVQTYNQLFEENPINASGVDAKAILSARLSKSRRLENLIAQLPGEKKNGLFGNLIALSLGLTPNFKSNFDLAEDAKLQLSKDTYDDDLDNLLAQIGDQYADLFLAAKNLSDAILLSDILRVNTEITKAPLSASMIKRYDEHHQDLTLLKALVRQQLPEKYKEIFFDQSKNGYAGYIDGGASQEEFYKFIKPILEKMDGTEELLVKLNREDLLRKQRTFDNGSIPHQIHLGELHAILRRQEDFYPFLKDNREKIEKILTFRIPYYVGPLARGNSRFAWMTRKSEETITPWNFEEVVDKGASAQSFIERMTNFDKNLPNEKVLPKHSLLYEYFTVYNELTKVKYVTEGMRKPAFLSGEQKKAIVDLLFKTNRKVTVKQLKEDYFKKIECFDSVEISGVEDRFNASLGTYHDLLKIIKDKDFLDNEENEDILEDIVLTLTLFEDREMIEERLKTYAHLFDDKVMKQLKRRRYTGWGRLSRKLINGIRDKQSGKTILDFLKSDGFANRNFMQLIHDDSLTFKEDIQKAQVSGQGDSLHEHIANLAGSPAIKKGILQTVKVVDELVKVMGRHKPENIVIEMARENQTTQKGQKNSRERMKRIEEGIKELGSQILKEHPVENTQLQNEKLYLYYLQNGRDMYVDQELDINRLSDYDVDHIVPQSFLKDDSIDNKVLTRSDKNRGKSDNVPSEEVVKKMKNYWRQLLNAKLITQRKFDNLTKAERGGLSELDKAGFIKRQLVETRQITKHVAQILDSRMNTKYDENDKLIREVKVITLKSKLVSDFRKDFQFYKVREINNYHHAHDAYLNAVVGTALIKKYPKLESEFVYGDYKVYDVRKMIAKSEQEIGKATAKYFFYSNIMNFFKTEITLANGEIRKRPLIETNGETGEIVWDKGRDFATVRKVLSMPQVNIVKKTEVQTGGFSKESILPKRNSDKLIARKKDWDPKKYGGFDSPTVAYSVLVVAKVEKGKSKKLKSVKELLGITIMERSSFEKNPIDFLEAKGYKEVKKDLIIKLPKYSLFELENGRKRMLASAGELQKGNELALPSKYVNFLYLASHYEKLKGSPGSSGSSGSETPGTSESATPESGSSSGSEVEFSHEYWMRHALTLAKRARDEREVPVGAVLVLNNRVIGEGWNRAIGLHDPTAHAEIMALRQGGLVMQNYRLIDATLYVTFEPCVMCAGAMIHSRIGRVVFGVRNAKTGAAGSLMDVLHYPGMNHRVEITEGILADECAALLCYFFRMPREDNEQKQLFVEQHKHYLDEIIEQISEFSKRVILADANLDKVLSAYNKHRDKPIREQAENIIHLFTLTNLGAPAAFKYFDTTIDRKRYTSTKEVLDATLIHQSITGLYETRIDLSQLGGD

SEQ ID NO: 275 - protein, 1546 aa, synthetic construct
  REGION 1..1546: note = 110.4 Cas9 TadAins 1250 polypeptide sequence
MDKKYSIGLAIGTNSVGWAVITDEYKVPSKKFKVLGNTDRHSIKKNLIGALLFDSGETAEATRLKRTARRRYTRRKNRICYLQEIFSNEMAKVDDSFFHRLEESFLVEEDKKHERHPIFGNIVDEVAYHEKYPTIYHLRKKLVDSTDKADLRLIYLALAHMIKFRGHFLIEGDLNPDNSDVDKLFIQLVQTYNQLFEENPINASGVDAKAILSARLSKSRRLENLIAQLPGEKKNGLFGNLIALSLGLTPNFKSNFDLAEDAKLQLSKDTYDDDLDNLLAQIGDQYADLFLAAKNLSDAILLSDILRVNTEITKAPLSASMIKRYDEHHQDLTLLKALVRQQLPEKYKEIFFDQSKNGYAGYIDGGASQEEFYKFIKPILEKMDGTEELLVKLNREDLLRKQRTFDNGSIPHQIHLGELHAILRRQEDFYPFLKDNREKIEKILTFRIPYYVGPLARGNSRFAWMTRKSEETITPWNFEEVVDKGASAQSFIERMTNFDKNLPNEKVLPKHSLLYEYFTVYNELTKVKYVTEGMRKPAFLSGEQKKAIVDLLFKTNRKVTVKQLKEDYFKKIECFDSVEISGVEDRFNASLGTYHDLLKIIKDKDFLDNEENEDILEDIVLTLTLFEDREMIEERLKTYAHLFDDKVMKQLKRRRYTGWGRLSRKLINGIRDKQSGKTILDFLKSDGFANRNFMQLIHDDSLTFKEDIQKAQVSGQGDSLHEHIANLAGSPAIKKGILQTVKVVDELVKVMGRHKPENIVIEMARENQTTQKGQKNSRERMKRIEEGIKELGSQILKEHPVENTQLQNEKLYLYYLQNGRDMYVDQELDINRLSDYDVDHIVPQSFLKDDSIDNKVLTRSDKNRGKSDNVPSEEVVKKMKNYWRQLLNAKLITQRKFDNLTKAERGGLSELDKAGFIKRQLVETRQITKHVAQILDSRMNTKYDENDKLIREVKVITLKSKLVSDFRKDFQFYKVREINNYHHAHDAYLNAVVGTALIKKYPKLESEFVYGDYKVYDVRKMIAKSEQEIGKATAKYFFYSNIMNFFKTEITLANGEIRKRPLIETNGETGEIVWDKGRDFATVRKVLSMPQVNIVKKTEVQTGGFSKESILPKRNSDKLIARKKDWDPKKYGGFDSPTVAYSVLVVAKVEKGKSKKLKSVKELLGITIMERSSFEKNPIDFLEAKGYKEVKKDLIIKLPKYSLFELENGRKRMLASAGELQKGNELALPSKYVNFLYLASHYEKLKGSPGSSGSSGSETPGTSESATPESGSSSGSEVEFSHEYWMRHALTLAKRARDEREVPVGAVLVLNNRVIGEGWNRAIGLHDPTAHAEIMALRQGGLVMQNYRLIDATLYVTFEPCVMCAGAMIHSRIGRVVFGVRNAKTGAAGSLMDVLHYPGMNHRVEITEGILADECAALLCYFFRMRREDNEQKQLFVEQHKHYLDEIIEQISEFSKRVILADANLDKVLSAYNKHRDKPIREQAENIIHLFTLTNLGAPAAFKYFDTTIDRKRYTSTKEVLDATLIHQSITGLYETRIDLSQLGGD

SEQ ID NO: 276 - protein, 1546 aa, synthetic construct
  REGION 1..1546: note = 110.5 Cas9 TadAins 1249 polypeptide sequence
MDKKYSIGLAIGTNSVGWAVITDEYKVPSKKFKVLGNTDRHSIKKNLIGALLFDSGETAEATRLKRTARRRYTRRKNRICYLQEIFSNEMAKVDDSFFHRLEESFLVEEDKKHERHPIFGNIVDEVAYHEKYPTIYHLRKKLVDSTDKADLRLIYLALAHMIKFRGHFLIEGDLNPDNSDVDKLFIQLVQTYNQLFEENPINASGVDAKAILSARLSKSRRLENLIAQLPGEKKNGLFGNLIALSLGLTPNFKSNFDLAEDAKLQLSKDTYDDDLDNLLAQIGDQYADLFLAAKNLSDAILLSDILRVNTEITKAPLSASMIKRYDEHHQDLTLLKALVRQQLPEKYKEIFFDQSKNGYAGYIDGGASQEEFYKFIKPILEKMDGTEELLVKLNREDLLRKQRTFDNGSIPHQIHLGELHAILRRQEDFYPFLKDNREKIEKILTFRIPYYVGPLARGNSRFAWMTRKSEETITPWNFEEVVDKGASAQSFIERMTNFDKNLPNEKVLPKHSLLYEYFTVYNELTKVKYVTEGMRKPAFLSGEQKKAIVDLLFKTNRKVTVKQLKEDYFKKIECFDSVEISGVEDRFNASLGTYHDLLKIIKDKDFLDNEENEDILEDIVLTLTLFEDREMIEERLKTYAHLFDDKVMKQLKRRRYTGWGRLSRKLINGIRDKQSGKTILDFLKSDGFANRNFMQLIHDDSLTFKEDIQKAQVSGQGDSLHEHIANLAGSPAIKKGILQTVKVVDELVKVMGRHKPENIVIEMARENQTTQKGQKNSRERMKRIEEGIKELGSQILKEHPVENTQLQNEKLYLYYLQNGRDMYVDQELDINRLSDYDVDHIVPQSFLKDDSIDNKVLTRSDKNRGKSDNVPSEEVVKKMKNYWRQLLNAKLITQRKFDNLTKAERGGLSELDKAGFIKRQLVETRQITKHVAQILDSRMNTKYDENDKLIREVKVITLKSKLVSDFRKDFQFYKVREINNYHHAHDAYLNAVVGTALIKKYPKLESEFVYGDYKVYDVRKMIAKSEQEIGKATAKYFFYSNIMNFFKTEITLANGEIRKRPLIETNGETGEIVWDKGRDFATVRKVLSMPQVNIVKKTEVQTGGFSKESILPKRNSDKLIARKKDWDPKKYGGFDSPTVAYSVLVVAKVEKGKSKKLKSVKELLGITIMERSSFEKNPIDFLEAKGYKEVKKDLIIKLPKYSLFELENGRKRMLASAGELQKGNELALPSKYVNFLYLASHYEKLKGSGSSGSSGSETPGTSESATPESGSSSGSEVEFSHEYWMRHALTLAKRARDEREVPVGAVLVLNNRVIGEGWNRAIGLHDPTAHAEIMALRQGGLVMQNYRLIDATLYVTFEPCVMCAGAMIHSRIGRVVFGVRNAKTGAAGSLMDVLHYPGMNHRVEITEGILADECAALLCYFFRMRRPEDNEQKQLFVEQHKHYLDEIIEQISEFSKRVILADANLDKVLSAYNKHRDKPIREQAENIIHLFTLTNLGAPAAFKYFDTTIDRKRYTSTKEVLDATLIHQSITGLYETRIDLSQLGGD

SEQ ID NO: 277 - protein, 1551 aa, synthetic construct
  REGION 1..1551: note = 110.5 Cas9 TadAins delta59-66 1250 polypeptide sequence
MDKKYSIGLAIGTNSVGWAVITDEYKVPSKKFKVLGNTDRHSIKKNLIGALLFDSGETAEATRLKRTARRRYTRRKNRICYLQEIFSNEMAKVDDSFFHRLEESFLVEEDKKHERHPIFGNIVDEVAYHEKYPTIYHLRKKLVDSTDKADLRLIYLALAHMIKFRGHFLIEGDLNPDNSDVDKLFIQLVQTYNQLFEENPINASGVDAKAILSARLSKSRRLENLIAQLPGEKKNGLFGNLIALSLGLTPNFKSNFDLAEDAKLQLSKDTYDDDLDNLLAQIGDQYADLFLAAKNLSDAILLSDILRVNTEITKAPLSASMIKRYDEHHQDLTLLKALVRQQLPEKYKEIFFDQSKNGYAGYIDGGASQEEFYKFIKPILEKMDGTEELLVKLNREDLLRKQRTFDNGSIPHQIHLGELHAILRRQEDFYPFLKDNREKIEKILTFRIPYYVGPLARGNSRFAWMTRKSEETITPWNFEEVVDKGASAQSFIERMTNFDKNLPNEKVLPKHSLLYEYFTVYNELTKVKYVTEGMRKPAFLSGEQKKAIVDLLFKTNRKVTVKQLKEDYFKKIECFDSVEISGVEDRFNASLGTYHDLLKIIKDKDFLDNEENEDILEDIVLTLTLFEDREMIEERLKTYAHLFDDKVMKQLKRRRYTGWGRLSRKLINGIRDKQSGKTILDFLKSDGFANRNFMQLIHDDSLTFKEDIQKAQVSGQGDSLHEHIANLAGSPAIKKGILQTVKVVDELVKVMGRHKPENIVIEMARENQTTQKGQKNSRERMKRIEEGIKELGSQILKEHPVENTQLQNEKLYLYYLQNGRDMYVDQELDINRLSDYDVDHIVPQSFLKDDSIDNKVLTRSDKNRGKSDNVPSEEVVKKMKNYWRQLLNAKLITQRKFDNLTKAERGGLSELDKAGFIKRQLVETRQITKHVAQILDSRMNTKYDENDKLIREVKVITLKSKLVSDFRKDFQFYKVREINNYHHAHDAYLNAVVGTALIKKYPKLESEFVYGDYKVYDVRKMIAKSEQEIGKATAKYFFYSNIMNFFKTEITLANGEIRKRPLIETNGETGEIVWDKGRDFATVRKVLSMPQVNIVKKTEVQTGGFSKESILPKRNSDKLIARKKDWDPKKYGGFDSPTVAYSVLVVAKVEKGKSKKLKSVKELLGITIMERSSFEKNPIDFLEAKGYKEVKKDLIIKLPKYSLFELENGRKRMLASAGELQKGNELALPSKYVNFLYLASHYEKLKGSPGSSGSSGSETPGTSESATPESGSSGSEVEFSHEYWMRHALTLAKRARDEREVPVGAVLVLNNRVIGEGWNRAHAEIMALRQGGLVMQNYRLIDATLYVTFEPCVMCAGAMIHSRIGRVVFGVRNAKTGAAGSLMDVLHYPGMNHRVEITEGILADECAALLCYFFRMPRQVFNAQKKAQSSTDEDNEQKQLFVEQHKHYLDEIIEQISEFSKRVILADANLDKVLSAYNKHRDKPIREQAENIIHLFTLTNLGAPAAFKYFDTTIDRKRYTSTKEVLDATLIHQSITGLYETRIDLSQLGGD

SEQ ID NO: 278 - protein, 1546 aa, synthetic construct
  REGION 1..1546: note = 110.6 Cas9 TadAins 1251 polypeptide sequence
MDKKYSIGLAIGTNSVGWAVITDEYKVPSKKFKVLGNTDRHSIKKNLIGALLFDSGETAEATRLKRTARRRYTRRKNRICYLQEIFSNEMAKVDDSFFHRLEESFLVEEDKKHERHPIFGNIVDEVAYHEKYPTIYHLRKKLVDSTDKADLRLIYLALAHMIKFRGHFLIEGDLNPDNSDVDKLFIQLVQTYNQLFEENPINASGVDAKAILSARLSKSRRLENLIAQLPGEKKNGLFGNLIALSLGLTPNFKSNFDLAEDAKLQLSKDTYDDDLDNLLAQIGDQYADLFLAAKNLSDAILLSDILRVNTEITKAPLSASMIKRYDEHHQDLTLLKALVRQQLPEKYKEIFFDQSKNGYAGYIDGGASQEEFYKFIKPILEKMDGTEELLVKLNREDLLRKQRTFDNGSIPHQIHLGELHAILRRQEDFYPFLKDNREKIEKILTFRIPYYVGPLARGNSRFAWMTRKSEETITPWNFEEVVDKGASAQSFIERMTNFDKNLPNEKVLPKHSLLYEYFTVYNELTKVKYVTEGMRKPAFLSGEQKKAIVDLLFKTNRKVTVKQLKEDYFKKIECFDSVEISGVEDRFNASLGTYHDLLKIIKDKDFLDNEENEDILEDIVLTLTLFEDREMIEERLKTYAHLFDDKVMKQLKRRRYTGWGRLSRKLINGIRDKQSGKTILDFLKSDGFANRNFMQLIHDDSLTFKEDIQKAQVSGQGDSLHEHIANLAGSPAIKKGILQTVKVVDELVKVMGRHKPENIVIEMARENQTTQKGQKNSRERMKRIEEGIKELGSQILKEHPVENTQLQNEKLYLYYLQNGRDMYVDQELDINRLSDYDVDHIVPQSFLKDDSIDNKVLTRSDKNRGKSDNVPSEEVVKKMKNYWRQLLNAKLITQRKFDNLTKAERGGLSELDKAGFIKRQLVETRQITKHVAQILDSRMNTKYDENDKLIREVKVITLKSKLVSDFRKDFQFYKVREINNYHHAHDAYLNAVVGTALIKKYPKLESEFVYGDYKVYDVRKMIAKSEQEIGKATAKYFFYSNIMNFFKTEITLANGEIRKRPLIETNGETGEIVWDKGRDFATVRKVLSMPQVNIVKKTEVQTGGFSKESILPKRNSDKLIARKKDWDPKKYGGFDSPTVAYSVLVVAKVEKGKSKKLKSVKELLGITIMERSSFEKNPIDFLEAKGYKEVKKDLIIKLPKYSLFELENGRKRMLASAGELQKGNELALPSKYVNFLYLASHYEKLKGSPEGSSGSSGSETPGTSESATPESGSSSGSEVEFSHEYWMRHALTLAKRARDEREVPVGAVLVLNNRVIGEGWNRAIGLHDPTAHAEIMALRQGGLVMQNYRLIDATLYVTFEPCVMCAGAMIHSRIGRVVFGVRNAKTGAAGSLMDVLHYPGMNHRVEITEGILADECAALLCYFFRMRRDNEQKQLFVEQHKHYLDEIIEQISEFSKRVILADANLDKVLSAYNKHRDKPIREQAENIIHLFTLTNLGAPAAFKYFDTTIDRKRYTSTKEVLDATLIHQSITGLYETRIDLSQLGGD

SEQ ID NO: 279 - protein, 1546 aa, synthetic construct
  REGION 1..1546: note = 110.7 Cas9 TadAins 1252 polypeptide sequence
MDKKYSIGLAIGTNSVGWAVITDEYKVPSKKFKVLGNTDRHSIKKNLIGALLFDSGETAEATRLKRTARRRYTRRKNRICYLQEIFSNEMAKVDDSFFHRLEESFLVEEDKKHERHPIFGNIVDEVAYHEKYPTIYHLRKKLVDSTDKADLRLIYLALAHMIKFRGHFLIEGDLNPDNSDVDKLFIQLVQTYNQLFEENPINASGVDAKAILSARLSKSRRLENLIAQLPGEKKNGLFGNLIALSLGLTPNFKSNFDLAEDAKLQLSKDTYDDDLDNLLAQIGDQYADLFLAAKNLSDAILLSDILRVNTEITKAPLSASMIKRYDEHHQDLTLLKALVRQQLPEKYKEIFFDQSKNGYAGYIDGGASQEEFYKFIKPILEKMDGTEELLVKLNREDLLRKQRTFDNGSIPHQIHLGELHAILRRQEDFYPFLKDNREKIEKILTFRIPYYVGPLARGNSRFAWMTRKSEETITPWNFEEVVDKGASAQSFIERMTNFDKNLPNEKVLPKHSLLYEYFTVYNELTKVKYVTEGMRKPAFLSGEQKKAIVDLLFKTNRKVTVKQLKEDYFKKIECFDSVEISGVEDRFNASLGTYHDLLKIIKDKDFLDNEENEDILEDIVLTLTLFEDREMIEERLKTYAHLFDDKVMKQLKRRRYTGWGRLSRKLINGIRDKQSGKTILDFLKSDGFANRNFMQLIHDDSLTFKEDIQKAQVSGQGDSLHEHIANLAGSPAIKKGILQTVKVVDELVKVMGRHKPENIVIEMARENQTTQKGQKNSRERMKRIEEGIKELGSQILKEHPVENTQLQNEKLYLYYLQNGRDMYVDQELDINRLSDYDVDHIVPQSFLKDDSIDNKVLTRSDKNRGKSDNVPSEEVVKKMKNYWRQLLNAKLITQRKFDNLTKAERGGLSELDKAGFIKRQLVETRQITKHVAQILDSRMNTKYDENDKLIREVKVITLKSKLVSDFRKDFQFYKVREINNYHHAHDAYLNAVVGTALIKKYPKLESEFVYGDYKVYDVRKMIAKSEQEIGKATAKYFFYSNIMNFFKTEITLANGEIRKRPLIETNGETGEIVWDKGRDFATVRKVLSMPQVNIVKKTEVQTGGFSKESILPKRNSDKLIARKKDWDPKKYGGFDSPTVAYSVLVVAKVEKGKSKKLKSVKELLGITIMERSSFEKNPIDFLEAKGYKEVKKDLIIKLPKYSLFELENGRKRMLASAGELQKGNELALPSKYVNFLYLASHYEKLKGSPEDGSSGSSGSETPGTSESATPESGSSSGSEVEFSHEYWMRHALTLAKRARDEREVPVGAVLVLNNRVIGEGWNRAIGLHDPTAHAEIMALRQGGLVMQNYRLIDATLYVTFEPCVMCAGAMIHSRIGRVVFGVRNAKTGAAGSLMDVLHYPGMNHRVEITEGILADECAALLCYFFRMRRNEQKQLFVEQHKHYLDEIIEQISEFSKRVILADANLDKVLSAYNKHRDKPIREQAENIIHLFTLTNLGAPAAFKYFDTTIDRKRYTSTKEVLDATLIHQSITGLYETRIDLSQLGGD

SEQ ID NO: 280 - protein, 1533 aa, synthetic construct
  REGION 1..1533: note = 110.8 Cas9 TadAins delta59-66 C-truncate 1250 polypeptide sequence
MDKKYSIGLAIGTNSVGWAVITDEYKVPSKKFKVLGNTDRHSIKKNLIGALLFDSGETAEATRLKRTARRRYTRRKNRICYLQEIFSNEMAKVDDSFFHRLEESFLVEEDKKHERHPIFGNIVDEVAYHEKYPTIYHLRKKLVDSTDKADLRLIYLALAHMIKFRGHFLIEGDLNPDNSDVDKLFIQLVQTYNQLFEENPINASGVDAKAILSARLSKSRRLENLIAQLPGEKKNGLFGNLIALSLGLTPNFKSNFDLAEDAKLQLSKDTYDDDLDNLLAQIGDQYADLFLAAKNLSDAILLSDILRVNTEITKAPLSASMIKRYDEHHQDLTLLKALVRQQLPEKYKEIFFDQSKNGYAGYIDGGASQEEFYKFIKPILEKMDGTEELLVKLNREDLLRKQRTFDNGSIPHQIHLGELHAILRRQEDFYPFLKDNREKIEKILTFRIPYYVGPLARGNSRFAWMTRKSEETITPWNFEEVVDKGASAQSFIERMTNFDKNLPNEKVLPKHSLLYEYFTVYNELTKVKYVTEGMRKPAFLSGEQKKAIVDLLFKTNRKVTVKQLKEDYFKKIECFDSVEISGVEDRFNASLGTYHDLLKIIKDKDFLDNEENEDILEDIVLTLTLFEDREMIEERLKTYAHLFDDKVMKQLKRRRYTGWGRLSRKLINGIRDKQSGKTILDFLKSDGFANRNFMQLIHDDSLTFKEDIQKAQVSGQGDSLHEHIANLAGSPAIKKGILQTVKVVDELVKVMGRHKPENIVIEMARENQTTQKGQKNSRERMKRIEEGIKELGSQILKEHPVENTQLQNEKLYLYYLQNGRDMYVDQELDINRLSDYDVDHIVPQSFLKDDSIDNKVLTRSDKNRGKSDNVPSEEVVKKMKNYWRQLLNAKLITQRKFDNLTKAERGGLSELDKAGFIKRQLVETRQITKHVAQILDSRMNTKYDENDKLIREVKVITLKSKLVSDFRKDFQFYKVREINNYHHAHDAYLNAVVGTALIKKYPKLESEFVYGDYKVYDVRKMIAKSEQEIGKATAKYFFYSNIMNFFKTEITLANGEIRKRPLIETNGETGEIVWDKGRDFATVRKVLSMPQVNIVKKTEVQTGGFSKESILPKRNSDKLIARKKDWDPKKYGGFDSPTVAYSVLVVAKVEKGKSKKLKSVKELLGITIMERSSFEKNPIDFLEAKGYKEVKKDLIIKLPKYSLFELENGRKRMLASAGELQKGNELALPSKYVNFLYLASHYEKLKGSPGSSGSETPGTSESATPESSGSEVEFSHEYWMRHALTLAKRARDEREVPVGAVLVLNNRVIGEGWNRAHAEIMALRQGGLVMQNYRLIDATLYVTFEPCVMCAGAMIHSRIGRVVFGVRNAKTGAAGSLMDVLHYPGMNHRVEITEGILADECAALLCYFFRMPRQEDNEQKQLFVEQHKHYLDEIIEQISEFSKRVILADANLDKVLSAYNKHRDKPIREQAENIIHLFTLTNLGAPAAFKYFDTTIDRKRYTSTKEVLDATLIHQSITGLYETRIDLSQLGGD

SEQ ID NO: 281 - protein, 1549 aa, synthetic construct
  REGION 1..1549: note = 111.1 Cas9 TadAins 997 polypeptide sequence
MDKKYSIGLAIGTNSVGWAVITDEYKVPSKKFKVLGNTDRHSIKKNLIGALLFDSGETAEATRLKRTARRRYTRRKNRICYLQEIFSNEMAKVDDSFFHRLEESFLVEEDKKHERHPIFGNIVDEVAYHEKYPTIYHLRKKLVDSTDKADLRLIYLALAHMIKFRGHFLIEGDLNPDNSDVDKLFIQLVQTYNQLFEENPINASGVDAKAILSARLSKSRRLENLIAQLPGEKKNGLFGNLIALSLGLTPNFKSNFDLAEDAKLQLSKDTYDDDLDNLLAQIGDQYADLFLAAKNLSDAILLSDILRVNTEITKAPLSASMIKRYDEHHQDLTLLKALVRQQLPEKYKEIFFDQSKNGYAGYIDGGASQEEFYKFIKPILEKMDGTEELLVKLNREDLLRKQRTFDNGSIPHQIHLGELHAILRRQEDFYPFLKDNREKIEKILTFRIPYYVGPLARGNSRFAWMTRKSEETITPWNFEEVVDKGASAQSFIERMTNFDKNLPNEKVLPKHSLLYEYFTVYNELTKVKYVTEGMRKPAFLSGEQKKAIVDLLFKTNRKVTVKQLKEDYFKKIECFDSVEISGVEDRFNASLGTYHDLLKIIKDKDFLDNEENEDILEDIVLTLTLFEDREMIEERLKTYAHLFDDKVMKQLKRRRYTGWGRLSRKLINGIRDKQSGKTILDFLKSDGFANRNFMQLIHDDSLTFKEDIQKAQVSGQGDSLHEHIANLAGSPAIKKGILQTVKVVDELVKVMGRHKPENIVIEMARENQTTQKGQKNSRERMKRIEEGIKELGSQILKEHPVENTQLQNEKLYLYYLQNGRDMYVDQELDINRLSDYDVDHIVPQSFLKDDSIDNKVLTRSDKNRGKSDNVPSEEVVKKMKNYWRQLLNAKLITQRKFDNLTKAERGGLSELDKAGFIKRQLVETRQITKHVAQILDSRMNTKYDENDKLIREVKVITLKSKLVSDFRKDFQFYKVREINNYHHAHDAYLNAVVGTALSHEYWMRHALTLAKRARDEREVPVGAVLVLNNRVIGEGWNRAIGLHDPTAHAEIMALRQGGLVMQNYRLIDATLYVTFEPCVMCAGAMIHSRIGRVVFGVRNAKTGAAGSLMDVLHYPGMNHRVEITEGILADECAALLCYFFRMPRQVFNAQKKAQSSTDGSSGSETPGTSESATPESSGIKKYPKLESEFVYGDYKVYDVRKMIAKSEQEIGKATAKYFFYSNIMNFFKTEITLANGEIRKRPLIETNGETGEIVWDKGRDFATVRKVLSMPQVNIVKKTEVQTGGFSKESILPKRNSDKLIARKKDWDPKKYGGFDSPTVAYSVLVVAKVEKGKSKKLKSVKELLGITIMERSSFEKNPIDFLEAKGYKEVKKDLIIKLPKYSLFELENGRKRMLASAGELQKGNELALPSKYVNFLYLASHYEKLKGSPEDNEQKQLFVEQHKHYLDEIIEQISEFSKRVILADANLDKVLSAYNKHRDKPIREQAENIIHLFTLTNLGAPAAFKYFDTTIDRKRYTSTKEVLDATLIHQSITGLYETRIDLSQLGGD

SEQ ID NO: 282 - protein, 1555 aa, synthetic construct
  REGION 1..1555: note = 111.2 Cas9 TadAins 997 polypeptide sequence
MDKKYSIGLAIGTNSVGWAVITDEYKVPSKKFKVLGNTDRHSIKKNLIGALLFDSGETAEATRLKRTARRRYTRRKNRICYLQEIFSNEMAKVDDSFFHRLEESFLVEEDKKHERHPIFGNIVDEVAYHEKYPTIYHLRKKLVDSTDKADLRLIYLALAHMIKFRGHFLIEGDLNPDNSDVDKLFIQLVQTYNQLFEENPINASGVDAKAILSARLSKSRRLENLIAQLPGEKKNGLFGNLIALSLGLTPNFKSNFDLAEDAKLQLSKDTYDDDLDNLLAQIGDQYADLFLAAKNLSDAILLSDILRVNTEITKAPLSASMIKRYDEHHQDLTLLKALVRQQLPEKYKEIFFDQSKNGYAGYIDGGASQEEFYKFIKPILEKMDGTEELLVKLNREDLLRKQRTFDNGSIPHQIHLGELHAILRRQEDFYPFLKDNREKIEKILTFRIPYYVGPLARGNSRFAWMTRKSEETITPWNFEEVVDKGASAQSFIERMTNFDKNLPNEKVLPKHSLLYEYFTVYNELTKVKYVTEGMRKPAFLSGEQKKAIVDLLFKTNRKVTVKQLKEDYFKKIECFDSVEISGVEDRFNASLGTYHDLLKIIKDKDFLDNEENEDILEDIVLTLTLFEDREMIEERLKTYAHLFDDKVMKQLKRRRYTGWGRLSRKLINGIRDKQSGKTILDFLKSDGFANRNFMQLIHDDSLTFKEDIQKAQVSGQGDSLHEHIANLAGSPAIKKGILQTVKVVDELVKVMGRHKPENIVIEMARENQTTQKGQKNSRERMKRIEEGIKELGSQILKEHPVENTQLQNEKLYLYYLQNGRDMYVDQELDINRLSDYDVDHIVPQSFLKDDSIDNKVLTRSDKNRGKSDNVPSEEVVKKMKNYWRQLLNAKLITQRKFDNLTKAERGGLSELDKAGFIKRQLVETRQITKHVAQILDSRMNTKYDENDKLIREVKVITLKSKLVSDFRKDFQFYKVREINNYHHAHDAYLNAVVGTALSHEYWMRHALTLAKRARDEREVPVGAVLVLNNRVIGEGWNRAIGLHDPTAHAEIMALRQGGLVMQNYRLIDATLYVTFEPCVMCAGAMIHSRIGRVVFGVRNAKTGAAGSLMDVLHYPGMNHRVEITEGILADECAALLCYFFRMPRQVFNAQKKAQSSTDGSSGSSGSETPGTSESATPESSGGSSIKKYPKLESEFVYGDYKVYDVRKMIAKSEQEIGKATAKYFFYSNIMNFFKTEITLANGEIRKRPLIETNGETGEIVWDKGRDFATVRKVLSMPQVNIVKKTEVQTGGFSKESILPKRNSDKLIARKKDWDPKKYGGFDSPTVAYSVLVVAKVEKGKSKKLKSVKELLGITIMERSSFEKNPIDFLEAKGYKEVKKDLIIKLPKYSLFELENGRKRMLASAGELQKGNELALPSKYVNFLYLASHYEKLKGSPEDNEQKQLFVEQHKHYLDEIIEQISEFSKRVILADANLDKVLSAYNKHRDKPIREQAENIIHLFTLTNLGAPAAFKYFDTTIDRKRYTSTKEVLDATLIHQSITGLYETRIDLSQLGGD

SEQ ID NO: 283 - protein, 1421 aa, synthetic construct
  REGION 1..1421: note = 112 delta HNH TadA polypeptide sequence
MDKKYSIGLAIGTNSVGWAVITDEYKVPSKKFKVLGNTDRHSIKKNLIGALLFDSGETAEATRLKRTARRRYTRRKNRICYLQEIFSNEMAKVDDSFFHRLEESFLVEEDKKHERHPIFGNIVDEVAYHEKYPTIYHLRKKLVDSTDKADLRLIYLALAHMIKFRGHFLIEGDLNPDNSDVDKLFIQLVQTYNQLFEENPINASGVDAKAILSARLSKSRRLENLIAQLPGEKKNGLFGNLIALSLGLTPNFKSNFDLAEDAKLQLSKDTYDDDLDNLLAQIGDQYADLFLAAKNLSDAILLSDILRVNTEITKAPLSASMIKRYDEHHQDLTLLKALVRQQLPEKYKEIFFDQSKNGYAGYIDGGASQEEFYKFIKPILEKMDGTEELLVKLNREDLLRKQRTFDNGSIPHQIHLGELHAILRRQEDFYPFLKDNREKIEKILTFRIPYYVGPLARGNSRFAWMTRKSEETITPWNFEEVVDKGASAQSFIERMTNFDKNLPNEKVLPKHSLLYEYFTVYNELTKVKYVTEGMRKPAFLSGEQKKAIVDLLFKTNRKVTVKQLKEDYFKKIECFDSVEISGVEDRFNASLGTYHDLLKIIKDKDFLDNEENEDILEDIVLTLTLFEDREMIEERLKTYAHLFDDKVMKQLKRRRYTGWGRLSRKLINGIRDKQSGKTILDFLKSDGFANRNFMQLIHDDSLTFKEDIQKAQVSGQGDSLHEHIANLAGSPAIKKGILQTVKVVDELVKVMGRHKPENIVIEMARENQTTQKGQKNSRERMKRIEEGIKELGSEVEFSHEYWMRHALTLAKRARDEREVPVGAVLVLNNRVIGEGWNRAIGLHDPTAHAEIMALRQGGLVMQNYRLIDATLYVTFEPCVMCAGAMIHSRIGRVVFGVRNAKTGAAGSLMDVLHYPGMNHRVEITEGILADECAALLCYFFRMPRQVFNAQKKAQSSTDGGLSELDKAGFIKRQLVETRQITKHVAQILDSRMNTKYDENDKLIREVKVITLKSKLVSDFRKDFQFYKVREINNYHHAHDAYLNAVVGTALIKKYPKLESEFVYGDYKVYDVRKMIAKSEQEIGKATAKYFFYSNIMNFFKTEITLANGEIRKRPLIETNGETGEIVWDKGRDFATVRKVLSMPQVNIVKKTEVQTGGFSKESILPKRNSDKLIARKKDWDPKKYGGFDSPTVAYSVLVVAKVEKGKSKKLKSVKELLGITIMERSSFEKNPIDFLEAKGYKEVKKDLIIKLPKYSLFELENGRKRMLASAGELQKGNELALPSKYVNFLYLASHYEKLKGSPEDNEQKQLFVEQHKHYLDEIIEQISEFSKRVILADANLDKVLSAYNKHRDKPIREQAENIIHLFTLTNLGAPAAFKYFDTTIDRKRYTSTKEVLDATLIHQSITGLYETRIDLSQLGGD

SEQ ID NO: 284 - protein, 1552 aa, synthetic construct
  REGION 1..1552: note = 113 N-term single TadA helixtrunc 165-end polypeptide sequence
MSEVEFSHEYWMRHALTLAKRARDEREVPVGAVLVLNNRVIGEGWNRAIGLHDPTAHAEIMALRQGGLVMQNYRLIDATLYVTFEPCVMCAGAMIHSRIGRVVFGVRNAKTGAAGSLMDVLHYPGMNHRVEITEGILADECAALLCYFFRMPRSGGSSGGSSGSETPGTSESATPESSGGSSGGSDKKYSIGLAIGTNSVGWAVITDEYKVPSKKFKVLGNTDRHSIKKNLIGALLFDSGETAEATRLKRTARRRYTRRKNRICYLQEIFSNEMAKVDDSFFHRLEESFLVEEDKKHERHPIFGNIVDEVAYHEKYPTIYHLRKKLVDSTDKADLRLIYLALAHMIKFRGHFLIEGDLNPDNSDVDKLFIQLVQTYNQLFEENPINASGVDAKAILSARLSKSRRLENLIAQLPGEKKNGLFGNLIALSLGLTPNFKSNFDLAEDAKLQLSKDTYDDDLDNLLAQIGDQYADLFLAAKNLSDAILLSDILRVNTEITKAPLSASMIKRYDEHHQDLTLLKALVRQQLPEKYKEIFFDQSKNGYAGYIDGGASQEEFYKFIKPILEKMDGTEELLVKLNREDLLRKQRTFDNGSIPHQIHLGELHAILRRQEDFYPFLKDNREKIEKILTFRIPYYVGPLARGNSRFAWMTRKSEETITPWNFEEVVDKGASAQSFIERMTNFDKNLPNEKVLPKHSLLYEYFTVYNELTKVKYVTEGMRKPAFLSGEQKKAIVDLLFKTNRKVTVKQLKEDYFKKIECFDSVEISGVEDRFNASLGTYHDLLKIIKDKDFLDNEENEDILEDIVLTLTLFEDREMIEERLKTYAHLFDDKVMKQLKRRRYTGWGRLSRKLINGIRDKQSGKTILDFLKSDGFANRNFMQLIHDDSLTFKEDIQKAQVSGQGDSLHEHIANLAGSPAIKKGILQTVKVVDELVKVMGRHKPENIVIEMARENQTTQKGQKNSRERMKRIEEGIKELGSQILKEHPVENTQLQNEKLYLYYLQNGRDMYVDQELDINRLSDYDVDHIVPQSFLKDDSIDNKVLTRSDKNRGKSDNVPSEEVVKKMKNYWRQLLNAKLITQRKFDNLTKAERGGLSELDKAGFIKRQLVETRQITKHVAQILDSRMNTKYDENDKLIREVKVITLKSKLVSDFRKDFQFYKVREINNYHHAHDAYLNAVVGTALIKKYPKLESEFVYGDYKVYDVRKMIAKSEQEIGKATAKYFFYSNIMNFFKTEITLANGEIRKRPLIETNGETGEIVWDKGRDFATVRKVLSMPQVNIVKKTEVQTGGFSKESILPKRNSDKLIARKKDWDPKKYGGFDSPTVAYSVLVVAKVEKGKSKKLKSVKELLGITIMERSSFEKNPIDFLEAKGYKEVKKDLIIKLPKYSLFELENGRKRMLASAGELQKGNELALPSKYVNFLYLASHYEKLKGSPEDNEQKQLFVEQHKHYLDEIIEQISEFSKRVILADANLDKVLSAYNKHRDKPIREQAENIIHLFTLTNLGAPAAFKYFDTTIDRKRYTSTKEVLDATLIHQSITGLYETRIDLSQLGGD

SEQ ID NO: 285 - protein, 1545 aa, synthetic construct
  REGION 1..1545: note = 114 N-term single TadA helixtrunc 165-end delta 59-65 polypeptide sequence
MSEVEFSHEYWMRHALTLAKRARDEREVPVGAVLVLNNRVIGEGWNRTAHAEIMALRQGGLVMQNYRLIDATLYVTFEPCVMCAGAMIHSRIGRVVFGVRNAKTGAAGSLMDVLHYPGMNHRVEITEGILADECAALLCYFFRMPRSGGSSGGSSGSETPGTSESATPESSGGSSGGSDKKYSIGLAIGTNSVGWAVITDEYKVPSKKFKVLGNTDRHSIKKNLIGALLFDSGETAEATRLKRTARRRYTRRKNRICYLQEIFSNEMAKVDDSFFHRLEESFLVEEDKKHERHPIFGNIVDEVAYHEKYPTIYHLRKKLVDSTDKADLRLIYLALAHMIKFRGHFLIEGDLNPDNSDVDKLFIQLVQTYNQLFEENPINASGVDAKAILSARLSKSRRLENLIAQLPGEKKNGLFGNLIALSLGLTPNFKSNFDLAEDAKLQLSKDTYDDDLDNLLAQIGDQYADLFLAAKNLSDAILLSDILRVNTEITKAPLSASMIKRYDEHHQDLTLLKALVRQQLPEKYKEIFFDQSKNGYAGYIDGGASQEEFYKFIKPILEKMDGTEELLVKLNREDLLRKQRTFDNGSIPHQIHLGELHAILRRQEDFYPFLKDNREKIEKILTFRIPYYVGPLARGNSRFAWMTRKSEETITPWNFEEVVDKGASAQSFIERMTNFDKNLPNEKVLPKHSLLYEYFTVYNELTKVKYVTEGMRKPAFLSGEQKKAIVDLLFKTNRKVTVKQLKEDYFKKIECFDSVEISGVEDRFNASLGTYHDLLKIIKDKDFLDNEENEDILEDIVLTLTLFEDREMIEERLKTYAHLFDDKVMKQLKRRRYTGWGRLSRKLINGIRDKQSGKTILDFLKSDGFANRNFMQLIHDDSLTFKEDIQKAQVSGQGDSLHEHIANLAGSPAIKKGILQTVKVVDELVKVMGRHKPENIVIEMARENQTTQKGQKNSRERMKRIEEGIKELGSQILKEHPVENTQLQNEKLYLYYLQNGRDMYVDQELDINRLSDYDVDHIVPQSFLKDDSIDNKVLTRSDKNRGKSDNVPSEEVVKKMKNYWRQLLNAKLITQRKFDNLTKAERGGLSELDKAGFIKRQLVETRQITKHVAQILDSRMNTKYDENDKLIREVKVITLKSKLVSDFRKDFQFYKVREINNYHHAHDAYLNAVVGTALIKKYPKLESEFVYGDYKVYDVRKMIAKSEQEIGKATAKYFFYSNIMNFFKTEITLANGEIRKRPLIETNGETGEIVWDKGRDFATVRKVLSMPQVNIVKKTEVQTGGFSKESILPKRNSDKLIARKKDWDPKKYGGFDSPTVAYSVLVVAKVEKGKSKKLKSVKELLGITIMERSSFEKNPIDFLEAKGYKEVKKDLIIKLPKYSLFELENGRKRMLASAGELQKGNELALPSKYVNFLYLASHYEKLKGSPEDNEQKQLFVEQHKHYLDEIIEQISEFSKRVILADANLDKVLSAYNKHRDKPIREQAENIIHLFTLTNLGAPAAFKYFDTTIDRKRYTSTKEVLDATLIHQSITGLYETRIDLSQLGGD

SEQ ID NO: 286 - protein, 1541 aa, synthetic construct
  REGION 1..1541: note = 115.1 Cas9 TadAins 1004 polypeptide sequence
MDKKYSIGLAIGTNSVGWAVITDEYKVPSKKFKVLGNTDRHSIKKNLIGALLFDSGETAEATRLKRTARRRYTRRKNRICYLQEIFSNEMAKVDDSFFHRLEESFLVEEDKKHERHPIFGNIVDEVAYHEKYPTIYHLRKKLVDSTDKADLRLIYLALAHMIKFRGHFLIEGDLNPDNSDVDKLFIQLVQTYNQLFEENPINASGVDAKAILSARLSKSRRLENLIAQLPGEKKNGLFGNLIALSLGLTPNFKSNFDLAEDAKLQLSKDTYDDDLDNLLAQIGDQYADLFLAAKNLSDAILLSDILRVNTEITKAPLSASMIKRYDEHHQDLTLLKALVRQQLPEKYKEIFFDQSKNGYAGYIDGGASQEEFYKFIKPILEKMDGTEELLVKLNREDLLRKQRTFDNGSIPHQIHLGELHAILRRQEDFYPFLKDNREKIEKILTFRIPYYVGPLARGNSRFAWMTRKSEETITPWNFEEVVDKGASAQSFIERMTNFDKNLPNEKVLPKHSLLYEYFTVYNELTKVKYVTEGMRKPAFLSGEQKKAIVDLLFKTNRKVTVKQLKEDYFKKIECFDSVEISGVEDRFNASLGTYHDLLKIIKDKDFLDNEENEDILEDIVLTLTLFEDREMIEERLKTYAHLFDDKVMKQLKRRRYTGWGRLSRKLINGIRDKQSGKTILDFLKSDGFANRNFMQLIHDDSLTFKEDIQKAQVSGQGDSLHEHIANLAGSPAIKKGILQTVKVVDELVKVMGRHKPENIVIEMARENQTTQKGQKNSRERMKRIEEGIKELGSQILKEHPVENTQLQNEKLYLYYLQNGRDMYVDQELDINRLSDYDVDHIVPQSFLKDDSIDNKVLTRSDKNRGKSDNVPSEEVVKKMKNYWRQLLNAKLITQRKFDNLTKAERGGLSELDKAGFIKRQLVETRQITKHVAQILDSRMNTKYDENDKLIREVKVITLKSKLVSDFRKDFQFYKVREINNYHHAHDAYLNAVVGTALIKKYPKGSSGSETPGTSESATPESSGSEVEFSHEYWMRHALTLAKRARDEREVPVGAVLVLNNRVIGEGWNRAIGLHDPTAHAEIMALRQGGLVMQNYRLIDATLYVTFEPCVMCAGAMIHSRIGRVVFGVRNAKTGAAGSLMDVLHYPGMNHRVEITEGILADECAALLCYFFRMPRQLESEFVYGDYKVYDVRKMIAKSEQEIGKATAKYFFYSNIMNFFKTEITLANGEIRKRPLIETNGETGEIVWDKGRDFATVRKVLSMPQVNIVKKTEVQTGGFSKESILPKRNSDKLIARKKDWDPKKYGGFDSPTVAYSVLVVAKVEKGKSKKLKSVKELLGITIMERSSFEKNPIDFLEAKGYKEVKKDLIIKLPKYSLFELENGRKRMLASAGELQKGNELALPSKYVNFLYLASHYEKLKGSPEDNEQKQLFVEQHKHYLDEIIEQISEFSKRVILADANLDKVLSAYNKHRDKPIREQAENIIHLFTLTNLGAPAAFKYFDTTIDRKRYTSTKEVLDATLIHQSITGLYETRIDLSQLGGD

SEQ ID NO: 287 - protein, 1541 aa, synthetic construct
  REGION 1..1541: note = 115.2 Cas9 TadAins 1005 polypeptide sequence
MDKKYSIGLAIGTNSVGWAVITDEYKVPSKKFKVLGNTDRHSIKKNLIGALLFDSGETAEATRLKRTARRRYTRRKNRICYLQEIFSNEMAKVDDSFFHRLEESFLVEEDKKHERHPIFGNIVDEVAYHEKYPTIYHLRKKLVDSTDKADLRLIYLALAHMIKFRGHFLIEGDLNPDNSDVDKLFIQLVQTYNQLFEENPINASGVDAKAILSARLSKSRRLENLIAQLPGEKKNGLFGNLIALSLGLTPNFKSNFDLAEDAKLQLSKDTYDDDLDNLLAQIGDQYADLFLAAKNLSDAILLSDILRVNTEITKAPLSASMIKRYDEHHQDLTLLKALVRQQLPEKYKEIFFDQSKNGYAGYIDGGASQEEFYKFIKPILEKMDGTEELLVKLNREDLLRKQRTFDNGSIPHQIHLGELHAILRRQEDFYPFLKDNREKIEKILTFRIPYYVGPLARGNSRFAWMTRKSEETITPWNFEEVVDKGASAQSFIERMTNFDKNLPNEKVLPKHSLLYEYFTVYNELTKVKYVTEGMRKPAFLSGEQKKAIVDLLFKTNRKVTVKQLKEDYFKKIECFDSVEISGVEDRFNASLGTYHDLLKIIKDKDFLDNEENEDILEDIVLTLTLFEDREMIEERLKTYAHLFDDKVMKQLKRRRYTGWGRLSRKLINGIRDKQSGKTILDFLKSDGFANRNFMQLIHDDSLTFKEDIQKAQVSGQGDSLHEHIANLAGSPAIKKGILQTVKVVDELVKVMGRHKPENIVIEMARENQTTQKGQKNSRERMKRIEEGIKELGSQILKEHPVENTQLQNEKLYLYYLQNGRDMYVDQELDINRLSDYDVDHIVPQSFLKDDSIDNKVLTRSDKNRGKSDNVPSEEVVKKMKNYWRQLLNAKLITQRKFDNLTKAERGGLSELDKAGFIKRQLVETRQITKHVAQILDSRMNTKYDENDKLIREVKVITLKSKLVSDFRKDFQFYKVREINNYHHAHDAYLNAVVGTALIKKYPKLGSSGSETPGTSESATPESSGSEVEFSHEYWMRHALTLAKRARDEREVPVGAVLVLNNRVIGEGWNRAIGLHDPTAHAEIMALRQGGLVMQNYRLIDATLYVTFEPCVMCAGAMIHSRIGRVVFGVRNAKTGAAGSLMDVLHYPGMNHRVEITEGILADECAALLCYFFRMPRQESEFVYGDYKVYDVRKMIAKSEQEIGKATAKYFFYSNIMNFFKTEITLANGEIRKRPLIETNGETGEIVWDKGRDFATVRKVLSMPQVNIVKKTEVQTGGFSKESILPKRNSDKLIARKKDWDPKKYGGFDSPTVAYSVLVVAKVEKGKSKKLKSVKELLGITIMERSSFEKNPIDFLEAKGYKEVKKDLIIKLPKYSLFELENGRKRMLASAGELQKGNELALPSKYVNFLYLASHYEKLKGSPEDNEQKQLFVEQHKHYLDEIIEQISEFSKRVILADANLDKVLSAYNKHRDKPIREQAENIIHLFTLTNLGAPAAFKYFDTTIDRKRYTSTKEVLDATLIHQSITGLYETRIDLSQLGGD

SEQ ID NO: 288 - protein, 1541 aa, synthetic construct
  REGION 1..1541: note = 115.3 Cas9 TadAins 1006 polypeptide sequence
MDKKYSIGLAIGTNSVGWAVITDEYKVPSKKFKVLGNTDRHSIKKNLIGALLFDSGETAEATRLKRTARRRYTRRKNRICYLQEIFSNEMAKVDDSFFHRLEESFLVEEDKKHERHPIFGNIVDEVAYHEKYPTIYHLRKKLVDSTDKADLRLIYLALAHMIKFRGHFLIEGDLNPDNSDVDKLFIQLVQTYNQLFEENPINASGVDAKAILSARLSKSRRLENLIAQLPGEKKNGLFGNLIALSLGLTPNFKSNFDLAEDAKLQLSKDTYDDDLDNLLAQIGDQYADLFLAAKNLSDAILLSDILRVNTEITKAPLSASMIKRYDEHHQDLTLLKALVRQQLPEKYKEIFFDQSKNGYAGYIDGGASQEEFYKFIKPILEKMDGTEELLVKLNREDLLRKQRTFDNGSIPHQIHLGELHAILRRQEDFYPFLKDNREKIEKILTFRIPYYVGPLARGNSRFAWMTRKSEETITPWNFEEVVDKGASAQSFIERMTNFDKNLPNEKVLPKHSLLYEYFTVYNELTKVKYVTEGMRKPAFLSGEQKKAIVDLLFKTNRKVTVKQLKEDYFKKIECFDSVEISGVEDRFNASLGTYHDLLKIIKDKDFLDNEENEDILEDIVLTLTLFEDREMIEERLKTYAHLFDDKVMKQLKRRRYTGWGRLSRKLINGIRDKQSGKTILDFLKSDGFANRNFMQLIHDDSLTFKEDIQKAQVSGQGDSLHEHIANLAGSPAIKKGILQTVKVVDELVKVMGRHKPENIVIEMARENQTTQKGQKNSRERMKRIEEGIKELGSQILKEHPVENTQLQNEKLYLYYLQNGRDMYVDQELDINRLSDYDVDHIVPQSFLKDDSIDNKVLTRSDKNRGKSDNVPSEEVVKKMKNYWRQLLNAKLITQRKFDNLTKAERGGLSELDKAGFIKRQLVETRQITKHVAQILDSRMNTKYDENDKLIREVKVITLKSKLVSDFRKDFQFYKVREINNYHHAHDAYLNAVVGTALIKKYPKLEGSSGSETPGTSESATPESSGSEVEFSHEYWMRHALTLAKRARDEREVPVGAVLVLNNRVIGEGWNRAIGLHDPTAHAEIMALRQGGLVMQNYRLIDATLYVTFEPCVMCAGAMIHSRIGRVVFGVRNAKTGAAGSLMDVLHYPGMNHRVEITEGILADECAALLCYFFRMPRQSEFVYGDYKVYDVRKMIAKSEQEIGKATAKYFFYSNIMNFFKTEITLANGEIRKRPLIETNGETGEIVWDKGRDFATVRKVLSMPQVNIVKKTEVQTGGFSKESILPKRNSDKLIARKKDWDPKKYGGFDSPTVAYSVLVVAKVEKGKSKKLKSVKELLGITIMERSSFEKNPIDFLEAKGYKEVKKDLIIKLPKYSLFELENGRKRMLASAGELQKGNELALPSKYVNFLYLASHYEKLKGSPEDNEQKQLFVEQHKHYLDEIIEQISEFSKRVILADANLDKVLSAYNKHRDKPIREQAENIIHLFTLTNLGAPAAFKYFDTTIDRKRYTSTKEVLDATLIHQSITGLYETRIDLSQLGGD

SEQ ID NO: 289 - protein, 1541 aa, synthetic construct
  REGION 1..1541: note = 115.4 Cas9 TadAins 1007 polypeptide sequence
MDKKYSIGLAIGTNSVGWAVITDEYKVPSKKFKVLGNTDRHSIKKNLIGALLFDSGETAEATRLKRTARRRYTRRKNRICYLQEIFSNEMAKVDDSFFHRLEESFLVEEDKKHERHPIFGNIVDEVAYHEKYPTIYHLRKKLVDSTDKADLRLIYLALAHMIKFRGHFLIEGDLNPDNSDVDKLFIQLVQTYNQLFEENPINASGVDAKAILSARLSKSRRLENLIAQLPGEKKNGLFGNLIALSLGLTPNFKSNFDLAEDAKLQLSKDTYDDDLDNLLAQIGDQYADLFLAAKNLSDAILLSDILRVNTEITKAPLSASMIKRYDEHHQDLTLLKALVRQQLPEKYKEIFFDQSKNGYAGYIDGGASQEEFYKFIKPILEKMDGTEELLVKLNREDLLRKQRTFDNGSIPHQIHLGELHAILRRQEDFYPFLKDNREKIEKILTFRIPYYVGPLARGNSRFAWMTRKSEETITPWNFEEVVDKGASAQSFIERMTNFDKNLPNEKVLPKHSLLYEYFTVYNELTKVKYVTEGMRKPAFLSGEQKKAIVDLLFKTNRKVTVKQLKEDYFKKIECFDSVEISGVEDRFNASLGTYHDLLKIIKDKDFLDNEENEDILEDIVLTLTLFEDREMIEERLKTYAHLFDDKVMKQLKRRRYTGWGRLSRKLINGIRDKQSGKTILDFLKSDGFANRNFMQLIHDDSLTFKEDIQKAQVSGQGDSLHEHIANLAGSPAIKKGILQTVKVVDELVKVMGRHKPENIVIEMARENQTTQKGQKNSRERMKRIEEGIKELGSQILKEHPVENTQLQNEKLYLYYLQNGRDMYVDQELDINRLSDYDVDHIVPQSFLKDDSIDNKVLTRSDKNRGKSDNVPSEEVVKKMKNYWRQLLNAKLITQRKFDNLTKAERGGLSELDKAGFIKRQLVETRQITKHVAQILDSRMNTKYDENDKLIREVKVITLKSKLVSDFRKDFQFYKVREINNYHHAHDAYLNAVVGTALIKKYPKLESGSSGSETPGTSESATPESSGSEVEFSHEYWMRHALTLAKRARDEREVPVGAVLVLNNRVIGEGWNRAIGLHDPTAHAEIMALRQGGLVMQNYRLIDATLYVTFEPCVMCAGAMIHSRIGRVVFGVRNAKTGAAGSLMDVLHYPGMNHRVEITEGILADECAALLCYFFRMPRQEFVYGDYKVYDVRKMIAKSEQEIGKATAKYFFYSNIMNFFKTEITLANGEIRKRPLIETNGETGEIVWDKGRDFATVRKVLSMPQVNIVKKTEVQTGGFSKESILPKRNSDKLIARKKDWDPKKYGGFDSPTVAYSVLVVAKVEKGKSKKLKSVKELLGITIMERSSFEKNPIDFLEAKGYKEVKKDLIIKLPKYSLFELENGRKRMLASAGELQKGNELALPSKYVNFLYLASHYEKLKGSPEDNEQKQLFVEQHKHYLDEIIEQISEFSKRVILADANLDKVLSAYNKHRDKPIREQAENIIHLFTLTNLGAPAAFKYFDTTIDRKRYTSTKEVLDATLIHQSITGLYETRIDLSQLGGD

SEQ ID NO: 290 - protein, 1541 aa, synthetic construct
  REGION 1..1541: note = 116.1 Cas9 TadAins C-term truncate 792 polypeptide sequence
MDKKYSIGLAIGTNSVGWAVITDEYKVPSKKFKVLGNTDRHSIKKNLIGALLFDSGETAEATRLKRTARRRYTRRKNRICYLQEIFSNEMAKVDDSFFHRLEESFLVEEDKKHERHPIFGNIVDEVAYHEKYPTIYHLRKKLVDSTDKADLRLIYLALAHMIKFRGHFLIEGDLNPDNSDVDKLFIQLVQTYNQLFEENPINASGVDAKAILSARLSKSRRLENLIAQLPGEKKNGLFGNLIALSLGLTPNFKSNFDLAEDAKLQLSKDTYDDDLDNLLAQIGDQYADLFLAAKNLSDAILLSDILRVNTEITKAPLSASMIKRYDEHHQDLTLLKALVRQQLPEKYKEIFFDQSKNGYAGYIDGGASQEEFYKFIKPILEKMDGTEELLVKLNREDLLRKQRTFDNGSIPHQIHLGELHAILRRQEDFYPFLKDNREKIEKILTFRIPYYVGPLARGNSRFAWMTRKSEETITPWNFEEVVDKGASAQSFIERMTNFDKNLPNEKVLPKHSLLYEYFTVYNELTKVKYVTEGMRKPAFLSGEQKKAIVDLLFKTNRKVTVKQLKEDYFKKIECFDSVEISGVEDRFNASLGTYHDLLKIIKDKDFLDNEENEDILEDIVLTLTLFEDREMIEERLKTYAHLFDDKVMKQLKRRRYTGWGRLSRKLINGIRDKQSGKTILDFLKSDGFANRNFMQLIHDDSLTFKEDIQKAQVSGQGDSLHEHIANLAGSPAIKKGILQTVKVVDELVKVMGRHKPENIVIEMARENQTTQKGQKNSRERMKRIEEGIKELGGSSGSETPGTSESATPESSGSEVEFSHEYWMRHALTLAKRARDEREVPVGAVLVLNNRVIGEGWNRAIGLHDPTAHAEIMALRQGGLVMQNYRLIDATLYVTFEPCVMCAGAMIHSRIGRVVFGVRNAKTGAAGSLMDVLHYPGMNHRVEITEGILADECAALLCYFFRMPRQSQILKEHPVENTQLQNEKLYLYYLQNGRDMYVDQELDINRLSDYDVDHIVPQSFLKDDSIDNKVLTRSDKNRGKSDNVPSEEVVKKMKNYWRQLLNAKLITQRKFDNLTKAERGGLSELDKAGFIKRQLVETRQITKHVAQILDSRMNTKYDENDKLIREVKVITLKSKLVSDFRKDFQFYKVREINNYHHAHDAYLNAVVGTALIKKYPKLESEFVYGDYKVYDVRKMIAKSEQEIGKATAKYFFYSNIMNFFKTEITLANGEIRKRPLIETNGETGEIVWDKGRDFATVRKVLSMPQVNIVKKTEVQTGGFSKESILPKRNSDKLIARKKDWDPKKYGGFDSPTVAYSVLVVAKVEKGKSKKLKSVKELLGITIMERSSFEKNPIDFLEAKGYKEVKKDLIIKLPKYSLFELENGRKRMLASAGELQKGNELALPSKYVNFLYLASHYEKLKGSPEDNEQKQLFVEQHKHYLDEIIEQISEFSKRVILADANLDKVLSAYNKHRDKPIREQAENIIHLFTLTNLGAPAAFKYFDTTIDRKRYTSTKEVLDATLIHQSITGLYETRIDLSQLGGD

SEQ ID NO: 291 - protein, 1541 aa, synthetic construct
  REGION 1..1541: note = 116.2 Cas9 TadAins C-term truncate 791 polypeptide sequence
MDKKYSIGLAIGTNSVGWAVITDEYKVPSKKFKVLGNTDRHSIKKNLIGALLFDSGETAEATRLKRTARRRYTRRKNRICYLQEIFSNEMAKVDDSFFHRLEESFLVEEDKKHERHPIFGNIVDEVAYHEKYPTIYHLRKKLVDSTDKADLRLIYLALAHMIKFRGHFLIEGDLNPDNSDVDKLFIQLVQTYNQLFEENPINASGVDAKAILSARLSKSRRLENLIAQLPGEKKNGLFGNLIALSLGLTPNFKSNFDLAEDAKLQLSKDTYDDDLDNLLAQIGDQYADLFLAAKNLSDAILLSDILRVNTEITKAPLSASMIKRYDEHHQDLTLLKALVRQQLPEKYKEIFFDQSKNGYAGYIDGGASQEEFYKFIKPILEKMDGTEELLVKLNREDLLRKQRTFDNGSIPHQIHLGELHAILRRQEDFYPFLKDNREKIEKILTFRIPYYVGPLARGNSRFAWMTRKSEETITPWNFEEVVDKGASAQSFIERMTNFDKNLPNEKVLPKHSLLYEYFTVYNELTKVKYVTEGMRKPAFLSGEQKKAIVDLLFKTNRKVTVKQLKEDYFKKIECFDSVEISGVEDRFNASLGTYHDLLKIIKDKDFLDNEENEDILEDIVLTLTLFEDREMIEERLKTYAHLFDDKVMKQLKRRRYTGWGRLSRKLINGIRDKQSGKTILDFLKSDGFANRNFMQLIHDDSLTFKEDIQKAQVSGQGDSLHEHIANLAGSPAIKKGILQTVKVVDELVKVMGRHKPENIVIEMARENQTTQKGQKNSRERMKRIEEGIKELGSSGSETPGTSESATPESSGSEVEFSHEYWMRHALTLAKRARDEREVPVGAVLVLNNRVIGEGWNRAIGLHDPTAHAEIMALRQGGLVMQNYRLIDATLYVTFEPCVMCAGAMIHSRIGRVVFGVRNAKTGAAGSLMDVLHYPGMNHRVEITEGILADECAALLCYFFRMPRQGSQILKEHPVENTQLQNEKLYLYYLQNGRDMYVDQELDINRLSDYDVDHIVPQSFLKDDSIDNKVLTRSDKNRGKSDNVPSEEVVKKMKNYWRQLLNAKLITQRKFDNLTKAERGGLSELDKAGFIKRQLVETRQITKHVAQILDSRMNTKYDENDKLIREVKVITLKSKLVSDFRKDFQFYKVREINNYHHAHDAYLNAVVGTALIKKYPKLESEFVYGDYKVYDVRKMIAKSEQEIGKATAKYFFYSNIMNFFKTEITLANGEIRKRPLIETNGETGEIVWDKGRDFATVRKVLSMPQVNIVKKTEVQTGGFSKESILPKRNSDKLIARKKDWDPKKYGGFDSPTVAYSVLVVAKVEKGKSKKLKSVKELLGITIMERSSFEKNPIDFLEAKGYKEVKKDLIIKLPKYSLFELENGRKRMLASAGELQKGNELALPSKYVNFLYLASHYEKLKGSPEDNEQKQLFVEQHKHYLDEIIEQISEFSKRVILADANLDKVLSAYNKHRDKPIREQAENIIHLFTLTNLGAPAAFKYFDTTIDRKRYTSTKEVLDATLIHQSITGLYETRIDLSQLGGD

SEQ ID NO: 292 - protein, 1541 aa, synthetic construct
  REGION 1..1541: note = 116.3 Cas9 TadAins C-term truncate 790 polypeptide sequence
MDKKYSIGLAIGTNSVGWAVITDEYKVPSKKFKVLGNTDRHSIKKNLIGALLFDSGETAEATRLKRTARRRYTRRKNRICYLQEIFSNEMAKVDDSFFHRLEESFLVEEDKKHERHPIFGNIVDEVAYHEKYPTIYHLRKKLVDSTDKADLRLIYLALAHMIKFRGHFLIEGDLNPDNSDVDKLFIQLVQTYNQLFEENPINASGVDAKAILSARLSKSRRLENLIAQLPGEKKNGLFGNLIALSLGLTPNFKSNFDLAEDAKLQLSKDTYDDDLDNLLAQIGDQYADLFLAAKNLSDAILLSDILRVNTEITKAPLSASMIKRYDEHHQDLTLLKALVRQQLPEKYKEIFFDQSKNGYAGYIDGGASQEEFYKFIKPILEKMDGTEELLVKLNREDLLRKQRTFDNGSIPHQIHLGELHAILRRQEDFYPFLKDNREKIEKILTFRIPYYVGPLARGNSRFAWMTRKSEETITPWNFEEVVDKGASAQSFIERMTNFDKNLPNEKVLPKHSLLYEYFTVYNELTKVKYVTEGMRKPAFLSGEQKKAIVDLLFKTNRKVTVKQLKEDYFKKIECFDSVEISGVEDRFNASLGTYHDLLKIIKDKDFLDNEENEDILEDIVLTLTLFEDREMIEERLKTYAHLFDDKVMKQLKRRRYTGWGRLSRKLINGIRDKQSGKTILDFLKSDGFANRNFMQLIHDDSLTFKEDIQKAQVSGQGDSLHEHIANLAGSPAIKKGILQTVKVVDELVKVMGRHKPENIVIEMARENQTTQKGQKNSRERMKRIEEGIKEGSSGSETPGTSESATPESSGSEVEFSHEYWMRHALTLAKRARDEREVPVGAVLVLNNRVIGEGWNRAIGLHDPTAHAEIMALRQGGLVMQNYRLIDATLYVTFEPCVMCAGAMIHSRIGRVVFGVRNAKTGAAGSLMDVLHYPGMNHRVEITEGILADECAALLCYFFRMPRQLGSQILKEHPVENTQLQNEKLYLYYLQNGRDMYVDQELDINRLSDYDVDHIVPQSFLKDDSIDNKVLTRSDKNRGKSDNVPSEEVVKKMKNYWRQLLNAKLITQRKFDNLTKAERGGLSELDKAGFIKRQLVETRQITKHVAQILDSRMNTKYDENDKLIREVKVITLKSKLVSDFRKDFQFYKVREINNYHHAHDAYLNAVVGTALIKKYPKLESEFVYGDYKVYDVRKMIAKSEQEIGKATAKYFFYSNIMNFFKTEITLANGEIRKRPLIETNGETGEIVWDKGRDFATVRKVLSMPQVNIVKKTEVQTGGFSKESILPKRNSDKLIARKKDWDPKKYGGFDSPTVAYSVLVVAKVEKGKSKKLKSVKELLGITIMERSSFEKNPIDFLEAKGYKEVKKDLIIKLPKYSLFELENGRKRMLASAGELQKGNELALPSKYVNFLYLASHYEKLKGSPEDNEQKQLFVEQHKHYLDEIIEQISEFSKRVILADANLDKVLSAYNKHRDKPIREQAENIIHLFTLTNLGAPAAFKYFDTTIDRKRYTSTKEVLDATLIHQSITGLYETRIDLSQLGGD

SEQ ID NO: 293 - protein, 1484 aa, synthetic construct
  REGION 1..1484: note = 117 Cas9 delta 1017-1069 polypeptide sequence
MDKKYSIGLAIGTNSVGWAVITDEYKVPSKKFKVLGNTDRHSIKKNLIGALLFDSGETAEATRLKRTARRRYTRRKNRICYLQEIFSNEMAKVDDSFFHRLEESFLVEEDKKHERHPIFGNIVDEVAYHEKYPTIYHLRKKLVDSTDKADLRLIYLALAHMIKFRGHFLIEGDLNPDNSDVDKLFIQLVQTYNQLFEENPINASGVDAKAILSARLSKSRRLENLIAQLPGEKKNGLFGNLIALSLGLTPNFKSNFDLAEDAKLQLSKDTYDDDLDNLLAQIGDQYADLFLAAKNLSDAILLSDILRVNTEITKAPLSASMIKRYDEHHQDLTLLKALVRQQLPEKYKEIFFDQSKNGYAGYIDGGASQEEFYKFIKPILEKMDGTEELLVKLNREDLLRKQRTFDNGSIPHQIHLGELHAILRRQEDFYPFLKDNREKIEKILTFRIPYYVGPLARGNSRFAWMTRKSEETITPWNFEEVVDKGASAQSFIERMTNFDKNLPNEKVLPKHSLLYEYFTVYNELTKVKYVTEGMRKPAFLSGEQKKAIVDLLFKTNRKVTVKQLKEDYFKKIECFDSVEISGVEDRFNASLGTYHDLLKIIKDKDFLDNEENEDILEDIVLTLTLFEDREMIEERLKTYAHLFDDKVMKQLKRRRYTGWGRLSRKLINGIRDKQSGKTILDFLKSDGFANRNFMQLIHDDSLTFKEDIQKAQVSGQGDSLHEHIANLAGSPAIKKGILQTVKVVDELVKVMGRHKPENIVIEMARENQTTQKGQKNSRERMKRIEEGIKELGSQILKEHPVENTQLQNEKLYLYYLQNGRDMYVDQELDINRLSDYDVDHIVPQSFLKDDSIDNKVLTRSDKNRGKSDNVPSEEVVKKMKNYWRQLLNAKLITQRKFDNLTKAERGGLSELDKAGFIKRQLVETRQITKHVAQILDSRMNTKYDENDKLIREVKVITLKSKLVSDFRKDFQFYKVREINNYHHAHDAYLNAVVGTALIKKYPKLESEFVYGDYKVYSSGSEVEFSHEYWMRHALTLAKRARDEREVPVGAVLVLNNRVIGEGWNRAIGLHDPTAHAEIMALRQGGLVMQNYRLIDATLYVTFEPCVMCAGAMIHSRIGRVVFGVRNAKTGAAGSLMDVLHYPGMNHRVEITEGILADECAALLCYFFRMPRQVFNAQKKAQSSTDGEIVWDKGRDFATVRKVLSMPQVNIVKKTEVQTGGFSKESILPKRNSDKLIARKKDWDPKKYGGFDSPTVAYSVLVVAKVEKGKSKKLKSVKELLGITIMERSSFEKNPIDFLEAKGYKEVKKDLIIKLPKYSLFELENGRKRMLASAGELQKGNELALPSKYVNFLYLASHYEKLKGSPEDNEQKQLFVEQHKHYLDEIIEQISEFSKRVILADANLDKVLSAYNKHRDKPIREQAENIIHLFTLTNLGAPAAFKYFDTTIDRKRYTSTKEVLDATLIHQSITGLYETRIDLSQLGGD

SEQ ID NO: 294 - protein, 1554 aa, synthetic construct
  REGION 1..1554: note = 118 Cas9 TadA-CP116ins 1067 polypeptide sequence
MDKKYSIGLAIGTNSVGWAVITDEYKVPSKKFKVLGNTDRHSIKKNLIGALLFDSGETAEATRLKRTARRRYTRRKNRICYLQEIFSNEMAKVDDSFFHRLEESFLVEEDKKHERHPIFGNIVDEVAYHEKYPTIYHLRKKLVDSTDKADLRLIYLALAHMIKFRGHFLIEGDLNPDNSDVDKLFIQLVQTYNQLFEENPINASGVDAKAILSARLSKSRRLENLIAQLPGEKKNGLFGNLIALSLGLTPNFKSNFDLAEDAKLQLSKDTYDDDLDNLLAQIGDQYADLFLAAKNLSDAILLSDILRVNTEITKAPLSASMIKRYDEHHQDLTLLKALVRQQLPEKYKEIFFDQSKNGYAGYIDGGASQEEFYKFIKPILEKMDGTEELLVKLNREDLLRKQRTFDNGSIPHQIHLGELHAILRRQEDFYPFLKDNREKIEKILTFRIPYYVGPLARGNSRFAWMTRKSEETITPWNFEEVVDKGASAQSFIERMTNFDKNLPNEKVLPKHSLLYEYFTVYNELTKVKYVTEGMRKPAFLSGEQKKAIVDLLFKTNRKVTVKQLKEDYFKKIECFDSVEISGVEDRFNASLGTYHDLLKIIKDKDFLDNEENEDILEDIVLTLTLFEDREMIEERLKTYAHLFDDKVMKQLKRRRYTGWGRLSRKLINGIRDKQSGKTILDFLKSDGFANRNFMQLIHDDSLTFKEDIQKAQVSGQGDSLHEHIANLAGSPAIKKGILQTVKVVDELVKVMGRHKPENIVIEMARENQTTQKGQKNSRERMKRIEEGIKELGSQILKEHPVENTQLQNEKLYLYYLQNGRDMYVDQELDINRLSDYDVDHIVPQSFLKDDSIDNKVLTRSDKNRGKSDNVPSEEVVKKMKNYWRQLLNAKLITQRKFDNLTKAERGGLSELDKAGFIKRQLVETRQITKHVAQILDSRMNTKYDENDKLIREVKVITLKSKLVSDFRKDFQFYKVREINNYHHAHDAYLNAVVGTALIKKYPKLESEFVYGDYKVYDVRKMIAKSEQEIGKATAKYFFYSNIMNFFKTEITLANGEIRKRPLIETNMNHRVEITEGILADECAALLCYFFRMPRQVFNAQKKAQSSTDGSSGSETPGTSESATPESSGSEVEFSHEYWMRHALTLAKRARDEREVPVGAVLVLNNRVIGEGWNRAIGLHDPTAHAEIMALRQGGLVMQNYRLIDATLYVTFEPCVMCAGAMIHSRIGRVVFGVRNAKTGAAGSLMDVLHYPGGETGEIVWDKGRDFATVRKVLSMPQVNIVKKTEVQTGGFSKESILPKRNSDKLIARKKDWDPKKYGGFDSPTVAYSVLVVAKVEKGKSKKLKSVKELLGITIMERSSFEKNPIDFLEAKGYKEVKKDLIIKLPKYSLFELENGRKRMLASAGELQKGNELALPSKYVNFLYLASHYEKLKGSPEDNEQKQLFVEQHKHYLDEIIEQISEFSKRVILADANLDKVLSAYNKHRDKPIREQAENIIHLFTLTNLGAPAAFKYFDTTIDRKRYTSTKEVLDATLIHQSITGLYETRIDLSQLGGD

SEQ ID NO: 295 - protein, 1554 aa, synthetic construct
  REGION 1..1554: note = 119 Cas9 TadAins 701 polypeptide sequence
MDKKYSIGLAIGTNSVGWAVITDEYKVPSKKFKVLGNTDRHSIKKNLIGALLFDSGETAEATRLKRTARRRYTRRKNRICYLQEIFSNEMAKVDDSFFHRLEESFLVEEDKKHERHPIFGNIVDEVAYHEKYPTIYHLRKKLVDSTDKADLRLIYLALAHMIKFRGHFLIEGDLNPDNSDVDKLFIQLVQTYNQLFEENPINASGVDAKAILSARLSKSRRLENLIAQLPGEKKNGLFGNLIALSLGLTPNFKSNFDLAEDAKLQLSKDTYDDDLDNLLAQIGDQYADLFLAAKNLSDAILLSDILRVNTEITKAPLSASMIKRYDEHHQDLTLLKALVRQQLPEKYKEIFFDQSKNGYAGYIDGGASQEEFYKFIKPILEKMDGTEELLVKLNREDLLRKQRTFDNGSIPHQIHLGELHAILRRQEDFYPFLKDNREKIEKILTFRIPYYVGPLARGNSRFAWMTRKSEETITPWNFEEVVDKGASAQSFIERMTNFDKNLPNEKVLPKHSLLYEYFTVYNELTKVKYVTEGMRKPAFLSGEQKKAIVDLLFKTNRKVTVKQLKEDYFKKIECFDSVEISGVEDRFNASLGTYHDLLKIIKDKDFLDNEENEDILEDIVLTLTLFEDREMIEERLKTYAHLFDDKVMKQLKRRRYTGWGRLSRKLINGIRDKQSGKTILDFLKSDGFANRNFMQLIHDDSGSSGSETPGTSESATPESSGSEVEFSHEYWMRHALTLAKRARDEREVPVGAVLVLNNRVIGEGWNRAIGLHDPTAHAEIMALRQGGLVMQNYRLIDATLYVTFEPCVMCAGAMIHSRIGRVVFGVRNAKTGAAGSLMDVLHYPGMNHRVEITEGILADECAALLCYFFRMPRQVFNAQKKAQSSTDLTFKEDIQKAQVSGQGDSLHEHIANLAGSPAIKKGILQTVKVVDELVKVMGRHKPENIVIEMARENQTTQKGQKNSRERMKRIEEGIKELGSQILKEHPVENTQLQNEKLYLYYLQNGRDMYVDQELDINRLSDYDVDHIVPQSFLKDDSIDNKVLTRSDKNRGKSDNVPSEEVVKKMKNYWRQLLNAKLITQRKFDNLTKAERGGLSELDKAGFIKRQLVETRQITKHVAQILDSRMNTKYDENDKLIREVKVITLKSKLVSDFRKDFQFYKVREINNYHHAHDAYLNAVVGTALIKKYPKLESEFVYGDYKVYDVRKMIAKSEQEIGKATAKYFFYSNIMNFFKTEITLANGEIRKRPLIETNGETGEIVWDKGRDFATVRKVLSMPQVNIVKKTEVQTGGFSKESILPKRNSDKLIARKKDWDPKKYGGFDSPTVAYSVLVVAKVEKGKSKKLKSVKELLGITIMERSSFEKNPIDFLEAKGYKEVKKDLIIKLPKYSLFELENGRKRMLASAGELQKGNELALPSKYVNFLYLASHYEKLKGSPEDNEQKQLFVEQHKHYLDEIIEQISEFSKRVILADANLDKVLSAYNKHRDKPIREQAENIIHLFTLTNLGAPAAFKYFDTTIDRKRYTSTKEVLDATLIHQSITGLYETRIDLSQLGGD

SEQ ID NO: 296 - protein, 1554 aa, synthetic construct
  REGION 1..1554: note = 120 Cas9 TadACP136ins 1248 polypeptide sequence
MDKKYSIGLAIGTNSVGWAVITDEYKVPSKKFKVLGNTDRHSIKKNLIGALLFDSGETAEATRLKRTARRRYTRRKNRICYLQEIFSNEMAKVDDSFFHRLEESFLVEEDKKHERHPIFGNIVDEVAYHEKYPTIYHLRKKLVDSTDKADLRLIYLALAHMIKFRGHFLIEGDLNPDNSDVDKLFIQLVQTYNQLFEENPINASGVDAKAILSARLSKSRRLENLIAQLPGEKKNGLFGNLIALSLGLTPNFKSNFDLAEDAKLQLSKDTYDDDLDNLLAQIGDQYADLFLAAKNLSDAILLSDILRVNTEITKAPLSASMIKRYDEHHQDLTLLKALVRQQLPEKYKEIFFDQSKNGYAGYIDGGASQEEFYKFIKPILEKMDGTEELLVKLNREDLLRKQRTFDNGSIPHQIHLGELHAILRRQEDFYPFLKDNREKIEKILTFRIPYYVGPLARGNSRFAWMTRKSEETITPWNFEEVVDKGASAQSFIERMTNFDKNLPNEKVLPKHSLLYEYFTVYNELTKVKYVTEGMRKPAFLSGEQKKAIVDLLFKTNRKVTVKQLKEDYFKKIECFDSVEISGVEDRFNASLGTYHDLLKIIKDKDFLDNEENEDILEDIVLTLTLFEDREMIEERLKTYAHLFDDKVMKQLKRRRYTGWGRLSRKLINGIRDKQSGKTILDFLKSDGFANRNFMQLIHDDSLTFKEDIQKAQVSGQGDSLHEHIANLAGSPAIKKGILQTVKVVDELVKVMGRHKPENIVIEMARENQTTQKGQKNSRERMKRIEEGIKELGSQILKEHPVENTQLQNEKLYLYYLQNGRDMYVDQELDINRLSDYDVDHIVPQSFLKDDSIDNKVLTRSDKNRGKSDNVPSEEVVKKMKNYWRQLLNAKLITQRKFDNLTKAERGGLSELDKAGFIKRQLVETRQITKHVAQILDSRMNTKYDENDKLIREVKVITLKSKLVSDFRKDFQFYKVREINNYHHAHDAYLNAVVGTALIKKYPKLESEFVYGDYKVYDVRKMIAKSEQEIGKATAKYFFYSNIMNFFKTEITLANGEIRKRPLIETNGETGEIVWDKGRDFATVRKVLSMPQVNIVKKTEVQTGGFSKESILPKRNSDKLIARKKDWDPKKYGGFDSPTVAYSVLVVAKVEKGKSKKLKSVKELLGITIMERSSFEKNPIDFLEAKGYKEVKKDLIIKLPKYSLFELENGRKRMLASAGELQKGNELALPSKYVNFLYLASHYEKLKGSMNHRVEITEGILADECAALLCYFFRMPRQVFNAQKKAQSSTDGSSGSETPGTSESATPESSGSEVEFSHEYWMRHALTLAKRARDEREVPVGAVLVLNNRVIGEGWNRAIGLHDPTAHAEIMALRQGGLVMQNYRLIDATLYVTFEPCVMCAGAMIHSRIGRVVFGVRNAKTGAAGSLMDVLHYPGPEDNEQKQLFVEQHKHYLDEIIEQISEFSKRVILADANLDKVLSAYNKHRDKPIREQAENIIHLFTLTNLGAPAAFKYFDTTIDRKRYTSTKEVLDATLIHQSITGLYETRIDLSQLGGD

SEQ ID NO: 297 - protein, 1554 aa, synthetic construct
  REGION 1..1554: note = 121 Cas9 TadACP136ins 1052 polypeptide sequence
MDKKYSIGLAIGTNSVGWAVITDEYKVPSKKFKVLGNTDRHSIKKNLIGALLFDSGETAEATRLKRTARRRYTRRKNRICYLQEIFSNEMAKVDDSFFHRLEESFLVEEDKKHERHPIFGNIVDEVAYHEKYPTIYHLRKKLVDSTDKADLRLIYLALAHMIKFRGHFLIEGDLNPDNSDVDKLFIQLVQTYNQLFEENPINASGVDAKAILSARLSKSRRLENLIAQLPGEKKNGLFGNLIALSLGLTPNFKSNFDLAEDAKLQLSKDTYDDDLDNLLAQIGDQYADLFLAAKNLSDAILLSDILRVNTEITKAPLSASMIKRYDEHHQDLTLLKALVRQQLPEKYKEIFFDQSKNGYAGYIDGGASQEEFYKFIKPILEKMDGTEELLVKLNREDLLRKQRTFDNGSIPHQIHLGELHAILRRQEDFYPFLKDNREKIEKILTFRIPYYVGPLARGNSRFAWMTRKSEETITPWNFEEVVDKGASAQSFIERMTNFDKNLPNEKVLPKHSLLYEYFTVYNELTKVKYVTEGMRKPAFLSGEQKKAIVDLLFKTNRKVTVKQLKEDYFKKIECFDSVEISGVEDRFNASLGTYHDLLKIIKDKDFLDNEENEDILEDIVLTLTLFEDREMIEERLKTYAHLFDDKVMKQLKRRRYTGWGRLSRKLINGIRDKQSGKTILDFLKSDGFANRNFMQLIHDDSLTFKEDIQKAQVSGQGDSLHEHIANLAGSPAIKKGILQTVKVVDELVKVMGRHKPENIVIEMARENQTTQKGQKNSRERMKRIEEGIKELGSQILKEHPVENTQLQNEKLYLYYLQNGRDMYVDQELDINRLSDYDVDHIVPQSFLKDDSIDNKVLTRSDKNRGKSDNVPSEEVVKKMKNYWRQLLNAKLITQRKFDNLTKAERGGLSELDKAGFIKRQLVETRQITKHVAQILDSRMNTKYDENDKLIREVKVITLKSKLVSDFRKDFQFYKVREINNYHHAHDAYLNAVVGTALIKKYPKLESEFVYGDYKVYDVRKMIAKSEQEIGKATAKYFFYSNIMNFFKTEITLAMNHRVEITEGILADECAALLCYFFRMPRQVFNAQKKAQSSTDGSSGSETPGTSESATPESSGSEVEFSHEYWMRHALTLAKRARDEREVPVGAVLVLNNRVIGEGWNRAIGLHDPTAHAEIMALRQGGLVMQNYRLIDATLYVTFEPCVMCAGAMIHSRIGRVVFGVRNAKTGAAGSLMDVLHYPGNGEIRKRPLIETNGETGEIVWDKGRDFATVRKVLSMPQVNIVKKTEVQTGGFSKESILPKRNSDKLIARKKDWDPKKYGGFDSPTVAYSVLVVAKVEKGKSKKLKSVKELLGITIMERSSFEKNPIDFLEAKGYKEVKKDLIIKLPKYSLFELENGRKRMLASAGELQKGNELALPSKYVNFLYLASHYEKLKGSPEDNEQKQLFVEQHKHYLDEIIEQISEFSKRVILADANLDKVLSAYNKHRDKPIREQAENIIHLFTLTNLGAPAAFKYFDTTIDRKRYTSTKEVLDATLIHQSITGLYETRIDLSQLGGD

SEQ ID NO: 298 - protein, 1554 aa, synthetic construct
  REGION 1..1554: note = 122 Cas9 TadACP136ins 1041 polypeptide sequence
MDKKYSIGLAIGTNSVGWAVITDEYKVPSKKFKVLGNTDRHSIKKNLIGALLFDSGETAEATRLKRTARRRYTRRKNRICYLQEIFSNEMAKVDDSFFHRLEESFLVEEDKKHERHPIFGNIVDEVAYHEKYPTIYHLRKKLVDSTDKADLRLIYLALAHMIKFRGHFLIEGDLNPDNSDVDKLFIQLVQTYNQLFEENPINASGVDAKAILSARLSKSRRLENLIAQLPGEKKNGLFGNLIALSLGLTPNFKSNFDLAEDAKLQLSKDTYDDDLDNLLAQIGDQYADLFLAAKNLSDAILLSDILRVNTEITKAPLSASMIKRYDEHHQDLTLLKALVRQQLPEKYKEIFFDQSKNGYAGYIDGGASQEEFYKFIKPILEKMDGTEELLVKLNREDLLRKQRTFDNGSIPHQIHLGELHAILRRQEDFYPFLKDNREKIEKILTFRIPYYVGPLARGNSRFAWMTRKSEETITPWNFEEVVDKGASAQSFIERMTNFDKNLPNEKVLPKHSLLYEYFTVYNELTKVKYVTEGMRKPAFLSGEQKKAIVDLLFKTNRKVTVKQLKEDYFKKIECFDSVEISGVEDRFNASLGTYHDLLKIIKDKDFLDNEENEDILEDIVLTLTLFEDREMIEERLKTYAHLFDDKVMKQLKRRRYTGWGRLSRKLINGIRDKQSGKTILDFLKSDGFANRNFMQLIHDDSLTFKEDIQKAQVSGQGDSLHEHIANLAGSPAIKKGILQTVKVVDELVKVMGRHKPENIVIEMARENQTTQKGQKNSRERMKRIEEGIKELGSQILKEHPVENTQLQNEKLYLYYLQNGRDMYVDQELDINRLSDYDVDHIVPQSFLKDDSIDNKVLTRSDKNRGKSDNVPSEEVVKKMKNYWRQLLNAKLITQRKFDNLTKAERGGLSELDKAGFIKRQLVETRQITKHVAQILDSRMNTKYDENDKLIREVKVITLKSKLVSDFRKDFQFYKVREINNYHHAHDAYLNAVVGTALIKKYPKLESEFVYGDYKVYDVRKMIAKSEQEIGKATAKYFFYSMNHRVEITEGILADECAALLCYFFRMPRQVFNAQKKAQSSTDGSSGSETPGTSESATPESSGSEVEFSHEYWMRHALTLAKRARDEREVPVGAVLVLNNRVIGEGWNRAIGLHDPTAHAEIMALRQGGLVMQNYRLIDATLYVTFEPCVMCAGAMIHSRIGRVVFGVRNAKTGAAGSLMDVLHYPGNIMNFFKTEITLANGEIRKRPLIETNGETGEIVWDKGRDFATVRKVLSMPQVNIVKKTEVQTGGFSKESILPKRNSDKLIARKKDWDPKKYGGFDSPTVAYSVLVVAKVEKGKSKKLKSVKELLGITIMERSSFEKNPIDFLEAKGYKEVKKDLIIKLPKYSLFELENGRKRMLASAGELQKGNELALPSKYVNFLYLASHYEKLKGSPEDNEQKQLFVEQHKHYLDEIIEQISEFSKRVILADANLDKVLSAYNKHRDKPIREQAENIIHLFTLTNLGAPAAFKYFDTTIDRKRYTSTKEVLDATLIHQSITGLYETRIDLSQLGGD

SEQ ID NO: 299 - protein, 1554 aa, synthetic construct
  REGION 1..1554: note = 123 Cas9 TadACP139ins 1299 polypeptide sequence
MDKKYSIGLAIGTNSVGWAVITDEYKVPSKKFKVLGNTDRHSIKKNLIGALLFDSGETAEATRLKRTARRRYTRRKNRICYLQEIFSNEMAKVDDSFFHRLEESFLVEEDKKHERHPIFGNIVDEVAYHEKYPTIYHLRKKLVDSTDKADLRLIYLALAHMIKFRGHFLIEGDLNPDNSDVDKLFIQLVQTYNQLFEENPINASGVDAKAILSARLSKSRRLENLIAQLPGEKKNGLFGNLIALSLGLTPNFKSNFDLAEDAKLQLSKDTYDDDLDNLLAQIGDQYADLFLAAKNLSDAILLSDILRVNTEITKAPLSASMIKRYDEHHQDLTLLKALVRQQLPEKYKEIFFDQSKNGYAGYIDGGASQEEFYKFIKPILEKMDGTEELLVKLNREDLLRKQRTFDNGSIPHQIHLGELHAILRRQEDFYPFLKDNREKIEKILTFRIPYYVGPLARGNSRFAWMTRKSEETITPWNFEEVVDKGASAQSFIERMTNFDKNLPNEKVLPKHSLLYEYFTVYNELTKVKYVTEGMRKPAFLSGEQKKAIVDLLFKTNRKVTVKQLKEDYFKKIECFDSVEISGVEDRFNASLGTYHDLLKIIKDKDFLDNEENEDILEDIVLTLTLFEDREMIEERLKTYAHLFDDKVMKQLKRRRYTGWGRLSRKLINGIRDKQSGKTILDFLKSDGFANRNFMQLIHDDSLTFKEDIQKAQVSGQGDSLHEHIANLAGSPAIKKGILQTVKVVDELVKVMGRHKPENIVIEMARENQTTQKGQKNSRERMKRIEEGIKELGSQILKEHPVENTQLQNEKLYLYYLQNGRDMYVDQELDINRLSDYDVDHIVPQSFLKDDSIDNKVLTRSDKNRGKSDNVPSEEVVKKMKNYWRQLLNAKLITQRKFDNLTKAERGGLSELDKAGFIKRQLVETRQITKHVAQILDSRMNTKYDENDKLIREVKVITLKSKLVSDFRKDFQFYKVREINNYHHAHDAYLNAVVGTALIKKYPKLESEFVYGDYKVYDVRKMIAKSEQEIGKATAKYFFYSNIMNFFKTEITLANGEIRKRPLIETNGETGEIVWDKGRDFATVRKVLSMPQVNIVKKTEVQTGGFSKESILPKRNSDKLIARKKDWDPKKYGGFDSPTVAYSVLVVAKVEKGKSKKLKSVKELLGITIMERSSFEKNPIDFLEAKGYKEVKKDLIIKLPKYSLFELENGRKRMLASAGELQKGNELALPSKYVNFLYLASHYEKLKGSPEDNEQKQLFVEQHKHYLDEIIEQISEFSKRVILADANLDKVLSAYNKHRMNHRVEITEGILADECAALLCYFFRMPRQVFNAQKKAQSSTDGSSGSETPGTSESATPESSGSEVEFSHEYWMRHALTLAKRARDEREVPVGAVLVLNNRVIGEGWNRAIGLHDPTAHAEIMALRQGGLVMQNYRLIDATLYVTFEPCVMCAGAMIHSRIGRVVFGVRNAKTGAAGSLMDVLHYPGDKPIREQAENIIHLFTLTNLGAPAAFKYFDTTIDRKRYTSTKEVLDATLIHQSITGLYETRIDLSQLGGD

SEQ ID NO: 300 - protein, 1454 aa, synthetic construct
  REGION 1..1454: note = 124 Cas9 delta 792-872TadAins polypeptide sequence
MDKKYSIGLAIGTNSVGWAVITDEYKVPSKKFKVLGNTDRHSIKKNLIGALLFDSGETAEATRLKRTARRRYTRRKNRICYLQEIFSNEMAKVDDSFFHRLEESFLVEEDKKHERHPIFGNIVDEVAYHEKYPTIYHLRKKLVDSTDKADLRLIYLALAHMIKFRGHFLIEGDLNPDNSDVDKLFIQLVQTYNQLFEENPINASGVDAKAILSARLSKSRRLENLIAQLPGEKKNGLFGNLIALSLGLTPNFKSNFDLAEDAKLQLSKDTYDDDLDNLLAQIGDQYADLFLAAKNLSDAILLSDILRVNTEITKAPLSASMIKRYDEHHQDLTLLKALVRQQLPEKYKEIFFDQSKNGYAGYIDGGASQEEFYKFIKPILEKMDGTEELLVKLNREDLLRKQRTFDNGSIPHQIHLGELHAILRRQEDFYPFLKDNREKIEKILTFRIPYYVGPLARGNSRFAWMTRKSEETITPWNFEEVVDKGASAQSFIERMTNFDKNLPNEKVLPKHSLLYEYFTVYNELTKVKYVTEGMRKPAFLSGEQKKAIVDLLFKTNRKVTVKQLKEDYFKKIECFDSVEISGVEDRFNASLGTYHDLLKIIKDKDFLDNEENEDILEDIVLTLTLFEDREMIEERLKTYAHLFDDKVMKQLKRRRYTGWGRLSRKLINGIRDKQSGKTILDFLKSDGFANRNFMQLIHDDSLTFKEDIQKAQVSGQGDSLHEHIANLAGSPAIKKGILQTVKVVDELVKVMGRHKPENIVIEMARENQTTQKGQKNSRERMKRIEEGIKELGSEVEFSHEYWMRHALTLAKRARDEREVPVGAVLVLNNRVIGEGWNRAIGLHDPTAHAEIMALRQGGLVMQNYRLIDATLYVTFEPCVMCAGAMIHSRIGRVVFGVRNAKTGAAGSLMDVLHYPGMNHRVEITEGILADECAALLCYFFRMPRQVFNAQKKAQSSTDEEVVKKMKNYWRQLLNAKLITQRKFDNLTKAERGGLSELDKAGFIKRQLVETRQITKHVAQILDSRMNTKYDENDKLIREVKVITLKSKLVSDFRKDFQFYKVREINNYHHAHDAYLNAVVGTALIKKYPKLESEFVYGDYKVYDVRKMIAKSEQEIGKATAKYFFYSNIMNFFKTEITLANGEIRKRPLIETNGETGEIVWDKGRDFATVRKVLSMPQVNIVKKTEVQTGGFSKESILPKRNSDKLIARKKDWDPKKYGGFDSPTVAYSVLVVAKVEKGKSKKLKSVKELLGITIMERSSFEKNPIDFLEAKGYKEVKKDLIIKLPKYSLFELENGRKRMLASAGELQKGNELALPSKYVNFLYLASHYEKLKGSPEDNEQKQLFVEQHKHYLDEIIEQISEFSKRVILADANLDKVLSAYNKHRDKPIREQAENIIHLFTLTNLGAPAAFKYFDTTIDRKRYTSTKEVLDATLIHQSITGLYETRIDLSQLGGD

SEQ ID NO: 301 - protein, 1420 aa, synthetic construct
  REGION 1..1420: note = 125 Cas9 delta 792-906TadAins polypeptide sequence
MDKKYSIGLAIGTNSVGWAVITDEYKVPSKKFKVLGNTDRHSIKKNLIGALLFDSGETAEATRLKRTARRRYTRRKNRICYLQEIFSNEMAKVDDSFFHRLEESFLVEEDKKHERHPIFGNIVDEVAYHEKYPTIYHLRKKLVDSTDKADLRLIYLALAHMIKFRGHFLIEGDLNPDNSDVDKLFIQLVQTYNQLFEENPINASGVDAKAILSARLSKSRRLENLIAQLPGEKKNGLFGNLIALSLGLTPNFKSNFDLAEDAKLQLSKDTYDDDLDNLLAQIGDQYADLFLAAKNLSDAILLSDILRVNTEITKAPLSASMIKRYDEHHQDLTLLKALVRQQLPEKYKEIFFDQSKNGYAGYIDGGASQEEFYKFIKPILEKMDGTEELLVKLNREDLLRKQRTFDNGSIPHQIHLGELHAILRRQEDFYPFLKDNREKIEKILTFRIPYYVGPLARGNSRFAWMTRKSEETITPWNFEEVVDKGASAQSFIERMTNFDKNLPNEKVLPKHSLLYEYFTVYNELTKVKYVTEGMRKPAFLSGEQKKAIVDLLFKTNRKVTVKQLKEDYFKKIECFDSVEISGVEDRFNASLGTYHDLLKIIKDKDFLDNEENEDILEDIVLTLTLFEDREMIEERLKTYAHLFDDKVMKQLKRRRYTGWGRLSRKLINGIRDKQSGKTILDFLKSDGFANRNFMQLIHDDSLTFKEDIQKAQVSGQGDSLHEHIANLAGSPAIKKGILQTVKVVDELVKVMGRHKPENIVIEMARENQTTQKGQKNSRERMKRIEEGIKELGSEVEFSHEYWMRHALTLAKRARDEREVPVGAVLVLNNRVIGEGWNRAIGLHDPTAHAEIMALRQGGLVMQNYRLIDATLYVTFEPCVMCAGAMIHSRIGRVVFGVRNAKTGAAGSLMDVLHYPGMNHRVEITEGILADECAALLCYFFRMPRQVFNAQKKAQSSTDGLSELDKAGFIKRQLVETRQITKHVAQILDSRMNTKYDENDKLIREVKVITLKSKLVSDFRKDFQFYKVREINNYHHAHDAYLNAVVGTALIKKYPKLESEFVYGDYKVYDVRKMIAKSEQEIGKATAKYFFYSNIMNFFKTEITLANGEIRKRPLIETNGETGEIVWDKGRDFATVRKVLSMPQVNIVKKTEVQTGGFSKESILPKRNSDKLIARKKDWDPKKYGGFDSPTVAYSVLVVAKVEKGKSKKLKSVKELLGITIMERSSFEKNPIDFLEAKGYKEVKKDLIIKLPKYSLFELENGRKRMLASAGELQKGNELALPSKYVNFLYLASHYEKLKGSPEDNEQKQLFVEQHKHYLDEIIEQISEFSKRVILADANLDKVLSAYNKHRDKPIREQAENIIHLFTLTNLGAPAAFKYFDTTIDRKRYTSTKEVLDATLIHQSITGLYETRIDLSQLGGD

SEQ ID NO: 302 - protein, 1554 aa, synthetic construct
  REGION 1..1554: note = 126 TadA CP65ins 1003 polypeptide sequence
MDKKYSIGLAIGTNSVGWAVITDEYKVPSKKFKVLGNTDRHSIKKNLIGALLFDSGETAEATRLKRTARRRYTRRKNRICYLQEIFSNEMAKVDDSFFHRLEESFLVEEDKKHERHPIFGNIVDEVAYHEKYPTIYHLRKKLVDSTDKADLRLIYLALAHMIKFRGHFLIEGDLNPDNSDVDKLFIQLVQTYNQLFEENPINASGVDAKAILSARLSKSRRLENLIAQLPGEKKNGLFGNLIALSLGLTPNFKSNFDLAEDAKLQLSKDTYDDDLDNLLAQIGDQYADLFLAAKNLSDAILLSDILRVNTEITKAPLSASMIKRYDEHHQDLTLLKALVRQQLPEKYKEIFFDQSKNGYAGYIDGGASQEEFYKFIKPILEKMDGTEELLVKLNREDLLRKQRTFDNGSIPHQIHLGELHAILRRQEDFYPFLKDNREKIEKILTFRIPYYVGPLARGNSRFAWMTRKSEETITPWNFEEVVDKGASAQSFIERMTNFDKNLPNEKVLPKHSLLYEYFTVYNELTKVKYVTEGMRKPAFLSGEQKKAIVDLLFKTNRKVTVKQLKEDYFKKIECFDSVEISGVEDRFNASLGTYHDLLKIIKDKDFLDNEENEDILEDIVLTLTLFEDREMIEERLKTYAHLFDDKVMKQLKRRRYTGWGRLSRKLINGIRDKQSGKTILDFLKSDGFANRNFMQLIHDDSLTFKEDIQKAQVSGQGDSLHEHIANLAGSPAIKKGILQTVKVVDELVKVMGRHKPENIVIEMARENQTTQKGQKNSRERMKRIEEGIKELGSQILKEHPVENTQLQNEKLYLYYLQNGRDMYVDQELDINRLSDYDVDHIVPQSFLKDDSIDNKVLTRSDKNRGKSDNVPSEEVVKKMKNYWRQLLNAKLITQRKFDNLTKAERGGLSELDKAGFIKRQLVETRQITKHVAQILDSRMNTKYDENDKLIREVKVITLKSKLVSDFRKDFQFYKVREINNYHHAHDAYLNAVVGTALIKKYPKTAHAEIMALRQGGLVMQNYRLIDATLYVTFEPCVMCAGAMIHSRIGRVVFGVRNAKTGAAGSLMDVLHYPGMNHRVEITEGILADECAALLCYFFRMPRQVFNAQKKAQSSTDGSSGSETPGTSESATPESSGSEVEFSHEYWMRHALTLAKRARDEREVPVGAVLVLNNRVIGEGWNRAIGLHDPLESEFVYGDYKVYDVRKMIAKSEQEIGKATAKYFFYSNIMNFFKTEITLANGEIRKRPLIETNGETGEIVWDKGRDFATVRKVLSMPQVNIVKKTEVQTGGFSKESILPKRNSDKLIARKKDWDPKKYGGFDSPTVAYSVLVVAKVEKGKSKKLKSVKELLGITIMERSSFEKNPIDFLEAKGYKEVKKDLIIKLPKYSLFELENGRKRMLASAGELQKGNELALPSKYVNFLYLASHYEKLKGSPEDNEQKQLFVEQHKHYLDEIIEQISEFSKRVILADANLDKVLSAYNKHRDKPIREQAENIIHLFTLTNLGAPAAFKYFDTTIDRKRYTSTKEVLDATLIHQSITGLYETRIDLSQLGGD

SEQ ID NO: 303 - protein, 1554 aa, synthetic construct
  REGION 1..1554: note = 127 TadA CP65ins 1016 polypeptide sequence
MDKKYSIGLAIGTNSVGWAVITDEYKVPSKKFKVLGNTDRHSIKKNLIGALLFDSGETAEATRLKRTARRRYTRRKNRICYLQEIFSNEMAKVDDSFFHRLEESFLVEEDKKHERHPIFGNIVDEVAYHEKYPTIYHLRKKLVDSTDKADLRLIYLALAHMIKFRGHFLIEGDLNPDNSDVDKLFIQLVQTYNQLFEENPINASGVDAKAILSARLSKSRRLENLIAQLPGEKKNGLFGNLIALSLGLTPNFKSNFDLAEDAKLQLSKDTYDDDLDNLLAQIGDQYADLFLAAKNLSDAILLSDILRVNTEITKAPLSASMIKRYDEHHQDLTLLKALVRQQLPEKYKEIFFDQSKNGYAGYIDGGASQEEFYKFIKPILEKMDGTEELLVKLNREDLLRKQRTFDNGSIPHQIHLGELHAILRRQEDFYPFLKDNREKIEKILTFRIPYYVGPLARGNSRFAWMTRKSEETITPWNFEEVVDKGASAQSFIERMTNFDKNLPNEKVLPKHSLLYEYFTVYNELTKVKYVTEGMRKPAFLSGEQKKAIVDLLFKTNRKVTVKQLKEDYFKKIECFDSVEISGVEDRFNASLGTYHDLLKIIKDKDFLDNEENEDILEDIVLTLTLFEDREMIEERLKTYAHLFDDKVMKQLKRRRYTGWGRLSRKLINGIRDKQSGKTILDFLKSDGFANRNFMQLIHDDSLTFKEDIQKAQVSGQGDSLHEHIANLAGSPAIKKGILQTVKVVDELVKVMGRHKPENIVIEMARENQTTQKGQKNSRERMKRIEEGIKELGSQILKEHPVENTQLQNEKLYLYYLQNGRDMYVDQELDINRLSDYDVDHIVPQSFLKDDSIDNKVLTRSDKNRGKSDNVPSEEVVKKMKNYWRQLLNAKLITQRKFDNLTKAERGGLSELDKAGFIKRQLVETRQITKHVAQILDSRMNTKYDENDKLIREVKVITLKSKLVSDFRKDFQFYKVREINNYHHAHDAYLNAVVGTALIKKYPKLESEFVYGDYKVTAHAEIMALRQGGLVMQNYRLIDATLYVTFEPCVMCAGAMIHSRIGRVVFGVRNAKTGAAGSLMDVLHYPGMNHRVEITEGILADECAALLCYFFRMPRQVFNAQKKAQSSTDGSSGSETPGTSESATPESSGSEVEFSHEYWMRHALTLAKRARDEREVPVGAVLVLNNRVIGEGWNRAIGLHDPYDVRKMIAKSEQEIGKATAKYFFYSNIMNFFKTEITLANGEIRKRPLIETNGETGEIVWDKGRDFATVRKVLSMPQVNIVKKTEVQTGGFSKESILPKRNSDKLIARKKDWDPKKYGGFDSPTVAYSVLVVAKVEKGKSKKLKSVKELLGITIMERSSFEKNPIDFLEAKGYKEVKKDLIIKLPKYSLFELENGRKRMLASAGELQKGNELALPSKYVNFLYLASHYEKLKGSPEDNEQKQLFVEQHKHYLDEIIEQISEFSKRVILADANLDKVLSAYNKHRDKPIREQAENIIHLFTLTNLGAPAAFKYFDTTIDRKRYTSTKEVLDATLIHQSITGLYETRIDLSQLGGD

SEQ ID NO: 304 - protein, 1554 aa, synthetic construct
  REGION 1..1554: note = 128 TadA CP65ins 1022 polypeptide sequence
MDKKYSIGLAIGTNSVGWAVITDEYKVPSKKFKVLGNTDRHSIKKNLIGALLFDSGETAEATRLKRTARRRYTRRKNRICYLQEIFSNEMAKVDDSFFHRLEESFLVEEDKKHERHPIFGNIVDEVAYHEKYPTIYHLRKKLVDSTDKADLRLIYLALAHMIKFRGHFLIEGDLNPDNSDVDKLFIQLVQTYNQLFEENPINASGVDAKAILSARLSKSRRLENLIAQLPGEKKNGLFGNLIALSLGLTPNFKSNFDLAEDAKLQLSKDTYDDDLDNLLAQIGDQYADLFLAAKNLSDAILLSDILRVNTEITKAPLSASMIKRYDEHHQDLTLLKALVRQQLPEKYKEIFFDQSKNGYAGYIDGGASQEEFYKFIKPILEKMDGTEELLVKLNREDLLRKQRTFDNGSIPHQIHLGELHAILRRQEDFYPFLKDNREKIEKILTFRIPYYVGPLARGNSRFAWMTRKSEETITPWNFEEVVDKGASAQSFIERMTNFDKNLPNEKVLPKHSLLYEYFTVYNELTKVKYVTEGMRKPAFLSGEQKKAIVDLLFKTNRKVTVKQLKEDYFKKIECFDSVEISGVEDRFNASLGTYHDLLKIIKDKDFLDNEENEDILEDIVLTLTLFEDREMIEERLKTYAHLFDDKVMKQLKRRRYTGWGRLSRKLINGIRDKQSGKTILDFLKSDGFANRNFMQLIHDDSLTFKEDIQKAQVSGQGDSLHEHIANLAGSPAIKKGILQTVKVVDELVKVMGRHKPENIVIEMARENQTTQKGQKNSRERMKRIEEGIKELGSQILKEHPVENTQLQNEKLYLYYLQNGRDMYVDQELDINRLSDYDVDHIVPQSFLKDDSIDNKVLTRSDKNRGKSDNVPSEEVVKKMKNYWRQLLNAKLITQRKFDNLTKAERGGLSELDKAGFIKRQLVETRQITKHVAQILDSRMNTKYDENDKLIREVKVITLKSKLVSDFRKDFQFYKVREINNYHHAHDAYLNAVVGTALIKKYPKLESEFVYGDYKVYDVRKMITAHAEIMALRQGGLVMQNYRLIDATLYVTFEPCVMCAGAMIHSRIGRVVFGVRNAKTGAAGSLMDVLHYPGMNHRVEITEGILADECAALLCYFFRMPRQVFNAQKKAQSSTDGSSGSETPGTSESATPESSGSEVEFSHEYWMRHALTLAKRARDEREVPVGAVLVLNNRVIGEGWNRAIGLHDPAKSEQEIGKATAKYFFYSNIMNFFKTEITLANGEIRKRPLIETNGETGEIVWDKGRDFATVRKVLSMPQVNIVKKTEVQTGGFSKESILPKRNSDKLIARKKDWDPKKYGGFDSPTVAYSVLVVAKVEKGKSKKLKSVKELLGITIMERSSFEKNPIDFLEAKGYKEVKKDLIIKLPKYSLFELENGRKRMLASAGELQKGNELALPSKYVNFLYLASHYEKLKGSPEDNEQKQLFVEQHKHYLDEIIEQISEFSKRVILADANLDKVLSAYNKHRDKPIREQAENIIHLFTLTNLGAPAAFKYFDTTIDRKRYTSTKEVLDATLIHQSITGLYETRIDLSQLGGD

SEQ ID NO: 305 - protein, 1554 aa, synthetic construct
  REGION 1..1554: note = 129 TadA CP65ins 1029 polypeptide sequence
MDKKYSIGLAIGTNSVGWAVITDEYKVPSKKFKVLGNTDRHSIKKNLIGALLFDSGETAEATRLKRTARRRYTRRKNRICYLQEIFSNEMAKVDDSFFHRLEESFLVEEDKKHERHPIFGNIVDEVAYHEKYPTIYHLRKKLVDSTDKADLRLIYLALAHMIKFRGHFLIEGDLNPDNSDVDKLFIQLVQTYNQLFEENPINASGVDAKAILSARLSKSRRLENLIAQLPGEKKNGLFGNLIALSLGLTPNFKSNFDLAEDAKLQLSKDTYDDDLDNLLAQIGDQYADLFLAAKNLSDAILLSDILRVNTEITKAPLSASMIKRYDEHHQDLTLLKALVRQQLPEKYKEIFFDQSKNGYAGYIDGGASQEEFYKFIKPILEKMDGTEELLVKLNREDLLRKQRTFDNGSIPHQIHLGELHAILRRQEDFYPFLKDNREKIEKILTFRIPYYVGPLARGNSRFAWMTRKSEETITPWNFEEVVDKGASAQSFIERMTNFDKNLPNEKVLPKHSLLYEYFTVYNELTKVKYVTEGMRKPAFLSGEQKKAIVDLLFKTNRKVTVKQLKEDYFKKIECFDSVEISGVEDRFNASLGTYHDLLKIIKDKDFLDNEENEDILEDIVLTLTLFEDREMIEERLKTYAHLFDDKVMKQLKRRRYTGWGRLSRKLINGIRDKQSGKTILDFLKSDGFANRNFMQLIHDDSLTFKEDIQKAQVSGQGDSLHEHIANLAGSPAIKKGILQTVKVVDELVKVMGRHKPENIVIEMARENQTTQKGQKNSRERMKRIEEGIKELGSQILKEHPVENTQLQNEKLYLYYLQNGRDMYVDQELDINRLSDYDVDHIVPQSFLKDDSIDNKVLTRSDKNRGKSDNVPSEEVVKKMKNYWRQLLNAKLITQRKFDNLTKAERGGLSELDKAGFIKRQLVETRQITKHVAQILDSRMNTKYDENDKLIREVKVITLKSKLVSDFRKDFQFYKVREINNYHHAHDAYLNAVVGTALIKKYPKLESEFVYGDYKVYDVRKMIAKSEQEITAHAEIMALRQGGLVMQNYRLIDATLYVTFEPCVMCAGAMIHSRIGRVVFGVRNAKTGAAGSLMDVLHYPGMNHRVEITEGILADECAALLCYFFRMPRQVFNAQKKAQSSTDGSSGSETPGTSESATPESSGSEVEFSHEYWMRHALTLAKRARDEREVPVGAVLVLNNRVIGEGWNRAIGLHDPGKATAKYFFYSNIMNFFKTEITLANGEIRKRPLIETNGETGEIVWDKGRDFATVRKVLSMPQVNIVKKTEVQTGGFSKESILPKRNSDKLIARKKDWDPKKYGGFDSPTVAYSVLVVAKVEKGKSKKLKSVKELLGITIMERSSFEKNPIDFLEAKGYKEVKKDLIIKLPKYSLFELENGRKRMLASAGELQKGNELALPSKYVNFLYLASHYEKLKGSPEDNEQKQLFVEQHKHYLDEIIEQISEFSKRVILADANLDKVLSAYNKHRDKPIREQAENIIHLFTLTNLGAPAAFKYFDTTIDRKRYTSTKEVLDATLIHQSITGLYETRIDLSQLGGD

SEQ ID NO: 306 - protein, 1554 aa, synthetic construct
  REGION 1..1554: note = 130 TadA CP65ins 1041 polypeptide sequence
MDKKYSIGLAIGTNSVGWAVITDEYKVPSKKFKVLGNTDRHSIKKNLIGALLFDSGETAEATRLKRTARRRYTRRKNRICYLQEIFSNEMAKVDDSFFHRLEESFLVEEDKKHERHPIFGNIVDEVAYHEKYPTIYHLRKKLVDSTDKADLRLIYLALAHMIKFRGHFLIEGDLNPDNSDVDKLFIQLVQTYNQLFEENPINASGVDAKAILSARLSKSRRLENLIAQLPGEKKNGLFGNLIALSLGLTPNFKSNFDLAEDAKLQLSKDTYDDDLDNLLAQIGDQYADLFLAAKNLSDAILLSDILRVNTEITKAPLSASMIKRYDEHHQDLTLLKALVRQQLPEKYKEIFFDQSKNGYAGYIDGGASQEEFYKFIKPILEKMDGTEELLVKLNREDLLRKQRTFDNGSIPHQIHLGELHAILRRQEDFYPFLKDNREKIEKILTFRIPYYVGPLARGNSRFAWMTRKSEETITPWNFEEVVDKGASAQSFIERMTNFDKNLPNEKVLPKHSLLYEYFTVYNELTKVKYVTEGMRKPAFLSGEQKKAIVDLLFKTNRKVTVKQLKEDYFKKIECFDSVEISGVEDRFNASLGTYHDLLKIIKDKDFLDNEENEDILEDIVLTLTLFEDREMIEERLKTYAHLFDDKVMKQLKRRRYTGWGRLSRKLINGIRDKQSGKTILDFLKSDGFANRNFMQLIHDDSLTFKEDIQKAQVSGQGDSLHEHIANLAGSPAIKKGILQTVKVVDELVKVMGRHKPENIVIEMARENQTTQKGQKNSRERMKRIEEGIKELGSQILKEHPVENTQLQNEKLYLYYLQNGRDMYVDQELDINRLSDYDVDHIVPQSFLKDDSIDNKVLTRSDKNRGKSDNVPSEEVVKKMKNYWRQLLNAKLITQRKFDNLTKAERGGLSELDKAGFIKRQLVETRQITKHVAQILDSRMNTKYDENDKLIREVKVITLKSKLVSDFRKDFQFYKVREINNYHHAHDAYLNAVVGTALIKKYPKLESEFVYGDYKVYDVRKMIAKSEQEIGKATAKYFFYSTAHAEIMALRQGGLVMQNYRLIDATLYVTFEPCVMCAGAMIHSRIGRVVFGVRNAKTGAAGSLMDVLHYPGMNHRVEITEGILADECAALLCYFFRMPRQVFNAQKKAQSSTDGSSGSETPGTSESATPESSGSEVEFSHEYWMRHALTLAKRARDEREVPVGAVLVLNNRVIGEGWNRAIGLHDPNIMNFFKTEITLANGEIRKRPLIETNGETGEIVWDKGRDFATVRKVLSMPQVNIVKKTEVQTGGFSKESILPKRNSDKLIARKKDWDPKKYGGFDSPTVAYSVLVVAKVEKGKSKKLKSVKELLGITIMERSSFEKNPIDFLEAKGYKEVKKDLIIKLPKYSLFELENGRKRMLASAGELQKGNELALPSKYVNFLYLASHYEKLKGSPEDNEQKQLFVEQHKHYLDEIIEQISEFSKRVILADANLDKVLSAYNKHRDKPIREQAENIIHLFTLTNLGAPAAFKYFDTTIDRKRYTSTKEVLDATLIHQSITGLYETRIDLSQLGGD

SEQ ID NO: 307 - protein, 1554 aa, synthetic construct
  REGION 1..1554: note = 131 TadA CP65ins 1054 polypeptide sequence
MDKKYSIGLAIGTNSVGWAVITDEYKVPSKKFKVLGNTDRHSIKKNLIGALLFDSGETAEATRLKRTARRRYTRRKNRICYLQEIFSNEMAKVDDSFFHRLEESFLVEEDKKHERHPIFGNIVDEVAYHEKYPTIYHLRKKLVDSTDKADLRLIYLALAHMIKFRGHFLIEGDLNPDNSDVDKLFIQLVQTYNQLFEENPINASGVDAKAILSARLSKSRRLENLIAQLPGEKKNGLFGNLIALSLGLTPNFKSNFDLAEDAKLQLSKDTYDDDLDNLLAQIGDQYADLFLAAKNLSDAILLSDILRVNTEITKAPLSASMIKRYDEHHQDLTLLKALVRQQLPEKYKEIFFDQSKNGYAGYIDGGASQEEFYKFIKPILEKMDGTEELLVKLNREDLLRKQRTFDNGSIPHQIHLGELHAILRRQEDFYPFLKDNREKIEKILTFRIPYYVGPLARGNSRFAWMTRKSEETITPWNFEEVVDKGASAQSFIERMTNFDKNLPNEKVLPKHSLLYEYFTVYNELTKVKYVTEGMRKPAFLSGEQKKAIVDLLFKTNRKVTVKQLKEDYFKKIECFDSVEISGVEDRFNASLGTYHDLLKIIKDKDFLDNEENEDILEDIVLTLTLFEDREMIEERLKTYAHLFDDKVMKQLKRRRYTGWGRLSRKLINGIRDKQSGKTILDFLKSDGFANRNFMQLIHDDSLTFKEDIQKAQVSGQGDSLHEHIANLAGSPAIKKGILQTVKVVDELVKVMGRHKPENIVIEMARENQTTQKGQKNSRERMKRIEEGIKELGSQILKEHPVENTQLQNEKLYLYYLQNGRDMYVDQELDINRLSDYDVDHIVPQSFLKDDSIDNKVLTRSDKNRGKSDNVPSEEVVKKMKNYWRQLLNAKLITQRKFDNLTKAERGGLSELDKAGFIKRQLVETRQITKHVAQILDSRMNTKYDENDKLIREVKVITLKSKLVSDFRKDFQFYKVREINNYHHAHDAYLNAVVGTALIKKYPKLESEFVYGDYKVYDVRKMIAKSEQEIGKATAKYFFYSNIMNFFKTEITLANTAHAEIMALRQGGLVMQNYRLIDATLYVTFEPCVMCAGAMIHSRIGRVVFGVRNAKTGAAGSLMDVLHYPGMNHRVEITEGILADECAALLCYFFRMPRQVFNAQKKAQSSTDGSSGSETPGTSESATPESSGSEVEFSHEYWMRHALTLAKRARDEREVPVGAVLVLNNRVIGEGWNRAIGLHDPGEIRKRPLIETNGETGEIVWDKGRDFATVRKVLSMPQVNIVKKTEVQTGGFSKESILPKRNSDKLIARKKDWDPKKYGGFDSPTVAYSVLVVAKVEKGKSKKLKSVKELLGITIMERSSFEKNPIDFLEAKGYKEVKKDLIIKLPKYSLFELENGRKRMLASAGELQKGNELALPSKYVNFLYLASHYEKLKGSPEDNEQKQLFVEQHKHYLDEIIEQISEFSKRVILADANLDKVLSAYNKHRDKPIREQAENIIHLFTLTNLGAPAAFKYFDTTIDRKRYTSTKEVLDATLIHQSITGLYETRIDLSQLGGD

SEQ ID NO: 308 - protein, 1554 aa, synthetic construct
  REGION 1..1554: note = 132 TadA CP65ins 1246 polypeptide sequence
MDKKYSIGLAIGTNSVGWAVITDEYKVPSKKFKVLGNTDRHSIKKNLIGALLFDSGETAEATRLKRTARRRYTRRKNRICYLQEIFSNEMAKVDDSFFHRLEESFLVEEDKKHERHPIFGNIVDEVAYHEKYPTIYHLRKKLVDSTDKADLRLIYLALAHMIKFRGHFLIEGDLNPDNSDVDKLFIQLVQTYNQLFEENPINASGVDAKAILSARLSKSRRLENLIAQLPGEKKNGLFGNLIALSLGLTPNFKSNFDLAEDAKLQLSKDTYDDDLDNLLAQIGDQYADLFLAAKNLSDAILLSDILRVNTEITKAPLSASMIKRYDEHHQDLTLLKALVRQQLPEKYKEIFFDQSKNGYAGYIDGGASQEEFYKFIKPILEKMDGTEELLVKLNREDLLRKQRTFDNGSIPHQIHLGELHAILRRQEDFYPFLKDNREKIEKILTFRIPYYVGPLARGNSRFAWMTRKSEETITPWNFEEVVDKGASAQSFIERMTNFDKNLPNEKVLPKHSLLYEYFTVYNELTKVKYVTEGMRKPAFLSGEQKKAIVDLLFKTNRKVTVKQLKEDYFKKIECFDSVEISGVEDRFNASLGTYHDLLKIIKDKDFLDNEENEDILEDIVLTLTLFEDREMIEERLKTYAHLFDDKVMKQLKRRRYTGWGRLSRKLINGIRDKQSGKTILDFLKSDGFANRNFMQLIHDDSLTFKEDIQKAQVSGQGDSLHEHIANLAGSPAIKKGILQTVKVVDELVKVMGRHKPENIVIEMARENQTTQKGQKNSRERMKRIEEGIKELGSQILKEHPVENTQLQNEKLYLYYLQNGRDMYVDQELDINRLSDYDVDHIVPQSFLKDDSIDNKVLTRSDKNRGKSDNVPSEEVVKKMKNYWRQLLNAKLITQRKFDNLTKAERGGLSELDKAGFIKRQLVETRQITKHVAQILDSRMNTKYDENDKLIREVKVITLKSKLVSDFRKDFQFYKVREINNYHHAHDAYLNAVVGTALIKKYPKLESEFVYGDYKVYDVRKMIAKSEQEIGKATAKYFFYSNIMNFFKTEITLANGEIRKRPLIETNGETGEIVWDKGRDFATVRKVLSMPQVNIVKKTEVQTGGFSKESILPKRNSDKLIARKKDWDPKKYGGFDSPTVAYSVLVVAKVEKGKSKKLKSVKELLGITIMERSSFEKNPIDFLEAKGYKEVKKDLIIKLPKYSLFELENGRKRMLASAGELQKGNELALPSKYVNFLYLASHYEKLKGTAHAEIMALRQGGLVMQNYRLIDATLYVTFEPCVMCAGAMIHSRIGRVVFGVRNAKTGAAGSLMDVLHYPGMNHRVEITEGILADECAALLCYFFRMPRQVFNAQKKAQSSTDGSSGSETPGTSESATPESSGSEVEFSHEYWMRHALTLAKRARDEREVPVGAVLVLNNRVIGEGWNRAIGLHDPSPEDNEQKQLFVEQHKHYLDEIIEQISEFSKRVILADANLDKVLSAYNKHRDKPIREQAENIIHLFTLTNLGAPAAFKYFDTTIDRKRYTSTKEVLDATLIHQSITGLYETRIDLSQLGGD

SEQ ID NO: 309 - protein, 160 aa, Staphylococcus aureus
  REGION 1..160: note = MISC_FEATURE - TadA polypeptide sequence
MGSHMTNDIYFMTLAIEEAKKAAQLGEVPIGAIITKDDEVIARAHNLRETLQQPTAHAEHIAIERAAKVLGSWRLEGCTLYVTLEPCVMCAGTIVMSRIPRVVYGADDPKGGCSGSLMNLLQQSNFNHRAIVDKGVLKEACSTLLTTFFKNLRANKKSTN

SEQ ID NO: 310 - protein, 161 aa, Bacillus subtilis
  REGION 1..161: note = MISC_FEATURE - TadA polypeptide sequence
MTQDELYMKEAIKEAKKAEEKGEVPIGAVLVINGEIIARAHNLRETEQRSIAHAEMLVIDEACKALGTWRLEGATLYVTLEPCPMCAGAVVLSRVEKVVFGAFDPKGGCSGTLMNLLQEERFNHQAEVVSGVLEEECGGMLSAFFRELRKKKKAARKNLSE

SEQ ID NO: 311 - protein, 183 aa, Salmonella enterica
  REGION 1..183: note = MISC_FEATURE - TadA polypeptide sequence
  source 1..183: note = serovar Typhimurium
MPPAFITGVTSLSDVELDHEYWMRHALTLAKRAWDEREVPVGAVLVHNHRVIGEGWNRPIGRHDPTAHAEIMALRQGGLVLQNYRLLDTTLYVTLEPCVMCAGAMVHSRIGRVVFGARDAKTGAAGSLIDVLHHPGMNHRVEIIEGVLRDECATLLSDFFRMRRQEIKALKKADRAEGAGPAV

SEQ ID NO: 312 - protein, 164 aa, Shewanella putrefaciens
  REGION 1..164: note = MISC_FEATURE - TadA polypeptide sequence
MDEYWMQVAMQMAEKAEAAGEVPVGAVLVKDGQQIATGYNLSISQHDPTAHAEILCLRSAGKKLENYRLLDATLYITLEPCAMCAGAMVHSRIARVVYGARDEKTGAAGTVVNLLQHPAFNHQVEVTSGVLAEACSAQLSRFFKRRRDEKKALKLAQRAQQGIE

SEQ ID NO: 313 - protein, 173 aa, Haemophilus influenzae
  REGION 1..173: note = MISC_FEATURE - TadA polypeptide sequence
MDAAKVRSEFDEKMMRYALELADKAEALGEIPVGAVLVDDARNIIGEGWNLSIVQSDPTAHAEIIALRNGAKNIQNYRLLNSTLYVTLEPCTMCAGAILHSRIKRLVFGASDYKTGAIGSRFHFFDDYKMNHTLEITSGVLAEECSQKLSTFFQKRREEKKIEKALLKSLSDK

SEQ ID NO: 314 - protein, 161 aa, Caulobacter crescentus
  REGION 1..161: note = MISC_FEATURE - TadA polypeptide sequence
MRTDESEDQDHRMMRLALDAARAAAEAGETPVGAVILDPSTGEVIATAGNGPIAAHDPTAHAEIAAMRAAAAKLGNYRLTDLTLVVTLEPCAMCAGAISHARIGRVVFGADDPKGGAVVHGPKFFAQPTCHWRPEVTGGVLADESADLLRGFFRARRKAKI

SEQ ID NO: 315 - protein, 179 aa, Geobacter sulfurreducens
  REGION 1..179: note = MISC_FEATURE - TadA polypeptide sequence
MSSLKKTPIRDDAYWMGKAIREAAKAAARDEVPIGAVIVRDGAVIGRGHNLREGSNDPSAHAEMIAIRQAARRSANWRLTGATLYVTLEPCLMCMGAIILARLERVVFGCYDPKGGAAGSLYDLSADPRLNHQVRLSPGVCQEECGTMLSDFFRDLRRRKKAKATPALFIDERKVPPEP

SEQ ID NO: 316 - protein, 167 aa, synthetic construct
  REGION 1..167: note = TadA*8 polypeptide sequence
MSEVEFSHEYWMRHALTLAKRARDEREVPVGAVLVLNNRVIGEGWNRAIGLHDPTAHAEIMALRQGGLVMQNYRLIDATLYVTFEPCVMCAGAMIHSRIGRVVFGVRNAKTGAAGSLMDVLHYPGMNHRVEITEGILADECAALLCTFFRMPRQVFNAQKKAQSSTD

SEQ ID NO: 317 - RNA, 80 nt, synthetic construct
  misc_feature 1..80: note = gRNA scaffold polynucleotide sequence
  source 1..80: mol_type = other RNA
gttttagagctagaaatagcaagttaaaataaggctagtccgttatcaacttgaaaaagtggcaccgagtcggtgctttt

SEQ ID NO: 318 - RNA, 125 nt, synthetic construct
  misc_feature 1..125: note = gRNA scaffold polynucleotide sequence
  source 1..125: mol_type = other RNA
gtttttgtactctcaagatttaagtaactgtacaacgaaacttacacagttacttaaatcttgcagaagctacaaagataaggcttcatgccgaaatcaacaccctgtcattttatggcagggtg

SEQ ID NO: 319 - RNA, 76 nt, Streptococcus pyogenes
  misc_feature 1..76: note = S. pyogenes gRNA scaffold oligonucleotide sequence
  source 1..76: mol_type = other RNA
gttttagagctagaaatagcaagttaaaataaggctagtccgttatcaacttgaaaaagtggcaccgagtcggtgc

SEQ ID NO: 320 - RNA, 84 nt, Staphylococcus aureus
  misc_feature 1..84: note = S. aureus gRNA scaffold oligonucleotide sequence
  source 1..84: mol_type = other RNA
gttttagtactctgtaatgaaaattacagaatctactaaaacaaggcaaaatgccgtgtttatctcgtcaacttgttggcgaga

SEQ ID NO: 321 - RNA, 97 nt, Bacillus hisashii
  misc_feature 1..97: note = BhCas12b gRNA scaffold oligonucleotide sequence
  source 1..97: mol_type = other RNA
gttctgtcttttggtcaggacaaccgtctagctataagtgctgcagggtgtgagaaactcctattgctggacgatgtctcttacgaggcattagcac

SEQ ID NO: 322 - RNA, 88 nt, Bacillus sp.
  misc_feature 1..88: note = BvCas12b gRNA scaffold oligonucleotide sequence
  source 1..88: mol_type = other RNA
gacctatagggtcaatgaatctgtgcgtgtgccataagtaattaaaaattacccaccacaggagcacctgaaaacaggtgcttggcac

SEQ ID NO: 323 - RNA, 80 nt, synthetic construct
  misc_feature 1..80: note = gRNA scaffold nucleotide sequence; oligonucleotide sequence
  modified_base 78..80: mod_base = um
  misc_feature 78..80: note = In embodiments, a nucleotide(s) is linked to the preceding 5' nucleotide by a 3' phosphorothioate internucleotide linkage
  source 1..80: mol_type = other RNA
gttttagagctagaaatagcaagttaaaataaggctagtccgttatcaacttgaaaaagtgggaccgagtcggtgctttt

SEQ ID NO: 324 - RNA, 80 nt, synthetic construct; identical to SEQ ID NO: 317
  misc_feature 1..80: note = gRNA scaffold nucleotide sequence
  misc_feature 78..80: note = In embodiments, a nucleotide(s) is linked to the preceding 5' nucleotide by a 3' phosphorothioate internucleotide linkage
  modified_base 78..80: mod_base = um
  source 1..80: mol_type = other RNA

SEQ ID NO: 325 - RNA, 117 nt, Bacillus hisashii
  misc_feature 1..117: note = BhCas12b gRNA scaffold + guide sequence; oligonucleotide sequence
  misc_feature 1..97: note = BhCas12b sgRNA scaffold
  source 1..117: mol_type = other RNA
gttctgtcttttggtcaggacaaccgtctagctataagtgctgcagggtgtgagaaactcctattgctggacgatgtctcttacgaggcattagcacnnnnnnnnnnnnnnnnnnnn

SEQ ID NO: 326 - RNA, 108 nt, Bacillus sp.
  misc_feature 1..108: note = BvCas12b gRNA scaffold + guide sequence; oligonucleotide sequence
  misc_feature 1..88: note = BvCas12b gRNA scaffold
  source 1..108: mol_type = other RNA
gacctatagggtcaatgaatctgtgcgtgtgccataagtaattaaaaattacccaccacaggagcacctgaaaacaggtgcttggcacnnnnnnnnnnnnnnnnnnnn

SEQ ID NO: 327 - RNA, 119 nt, Alicyclobacillus acidiphilus
  misc_feature 1..119: note = AaCas12b gRNA scaffold + guide sequence; oligonucleotide sequence
  misc_feature 1..99: note = AaCas12b gRNA scaffold
  source 1..119: mol_type = other RNA
gtctaaaggacagaatttttcaacgggtgtgccaatggccactttccaggtggcaaagcccgttgaacttctcaaaaagaacgatctgagaagtggcacnnnnnnnnnnnnnnnnnnnn

SEQ ID NO: 328 - protein, 29 aa, synthetic construct
  REGION 1..29: note = synthetic polypeptide sequence
PKKKRKVEGADKRTADGSEFESPKKKRKV

SEQ ID NO: 329 - protein, 23 aa, synthetic construct
  REGION 1..23: note = synthetic peptide sequence
RKSGKIAAIVVKRPRKPKKKRKV

SEQ ID NO: 330 - protein, 8 aa, synthetic construct
  REGION 1..8: note = synthetic peptide sequence
SGGSSGGS

SEQ ID NO: 331 - protein, 1609 aa, synthetic construct
  REGION 1..1609: note = pNMG-B335ABE8.1_Y147T_CP5_NGC PAM_monomer polypeptide sequence
MSEVEFSHEYWMRHALTLAKRARDEREVPVGAVLVLNNRVIGEGWNRAIGLHDPTAHAEIMALRQGGLVMQNYRLIDATLYVTFEPCVMCAGAMIHSRIGRVVFGVRNAKTGAAGSLMDVLHYPGMNHRVEITEGILADECAALLCTFFRMPRQVFNAQKKAQSSTDSGGSSGGSSGSETPGTSESATPESSGGSSGGSEIGKATAKYFFYSNIMNFFKTEITLANGEIRKRPLIETNGETGEIVWDKGRDFATVRKVLSMPQVNIVKKTEVQTGGFSKESILPKRNSDKLIARKKDWDPKKYGGFMQPTVAYSVLVVAKVEKGKSKKLKSVKELLGITIMERSSFEKNPIDFLEAKGYKEVKKDLIIKLPKYSLFELENGRKRMLASAKFLQKGNELALPSKYVNFLYLASHYEKLKGSPEDNEQKQLFVEQHKHYLDEIIEQISEFSKRVILADANLDKVLSAYNKHRDKPIREQAENIIHLFTLTNLGAPRAFKYFDTTIARKEYRSTKEVLDATLIHQSITGLYETRIDLSQLGGDGGSGGSGGSGGSGGSGGSGGMDKKYSIGLAIGTNSVGWAVITDEYKVPSKKFKVLGNTDRHSIKKNLIGALLFDSGETAEATRLKRTARRRYTRRKNRICYLQEIFSNEMAKVDDSFFHRLEESFLVEEDKKHERHPIFGNIVDEVAYHEKYPTIYHLRKKLVDSTDKADLRLIYLALAHMIKFRGHFLIEGDLNPDNSDVDKLFIQLVQTYNQLFEENPINASGVDAKAILSARLSKSRRLENLIAQLPGEKKNGLFGNLIALSLGLTPNFKSNFDLAEDAKLQLSKDTYDDDLDNLLAQIGDQYADLFLAAKNLSDAILLSDILRVNTEITKAPLSASMIKRYDEHHQDLTLLKALVRQQLPEKYKEIFFDQSKNGYAGYIDGGASQEEFYKFIKPILEKMDGTEELLVKLNREDLLRKQRTFDNGSIPHQIHLGELHAILRRQEDFYPFLKDNREKIEKILTFRIPYYVGPLARGNSRFAWMTRKSEETITPWNFEEVVDKGASAQSFIERMTNFDKNLPNEKVLPKHSLLYEYFTVYNELTKVKYVTEGMRKPAFLSGEQKKAIVDLLFKTNRKVTVKQLKEDYFKKIECFDSVEISGVEDRFNASLGTYHDLLKIIKDKDFLDNEENEDILEDIVLTLTLFEDREMIEERLKTYAHLFDDKVMKQLKRRRYTGWGRLSRKLINGIRDKQSGKTILDFLKSDGFANRNFMQLIHDDSLTFKEDIQKAQVSGQGDSLHEHIANLAGSPAIKKGILQTVKVVDELVKVMGRHKPENIVIEMARENQTTQKGQKNSRERMKRIEEGIKELGSQILKEHPVENTQLQNEKLYLYYLQNGRDMYVDQELDINRLSDYDVDHIVPQSFLKDDSIDNKVLTRSDKNRGKSDNVPSEEVVKKMKNYWRQLLNAKLITQRKFDNLTKAERGGLSELDKAGFIKRQLVETRQITKHVAQILDSRMNTKYDENDKLIREVKVITLKSKLVSDFRKDFQFYKVREINNYHHAHDAYLNAVVGTALIKKYPKLESEFVYGDYKVYDVRKMIAKSEQEGADKRTADGSEFESPKKKRKV

SEQ ID NO: 332 - protein, 1807 aa, synthetic construct
  REGION 1..1807: note = pNMG-357_ABE8.14 with NGC PAMCP5 polypeptide sequence
  REGION 1..174: note = MISC_FEATURE - Adenosine deaminase sequence
  REGION 175..198: note = MISC_FEATURE - Linker sequence
  REGION 199..365: note = MISC_FEATURE - Adenosine deaminase sequence
  REGION 366..397: note = MISC_FEATURE - Linker sequence
  REGION 398..738: note = MISC_FEATURE - Sequence derived from Cas9
  REGION 739..759: note = MISC_FEATURE - Linker sequence
  REGION 760..1785: note = MISC_FEATURE - Sequence derived from Cas9
  REGION 1786..1807: note = MISC_FEATURE - Bipartite nuclear localization sequence
MSEVEFSHEYWMRHALTLAKRAWDEREVPVGAVLVHNNRVIGEGWNRPIGRHDPTAHAEIMALRQGGLVMQNYRLIDATLYVTLEPCVMCAGAMIHSRIGRVVFGARDAKTGAAGSLMDVLHHPGMNHRVEITEGILADECAALLSDFFRMRRQEIKAQKKAQSSTDGGSSGGSSGSETPGTSESATPESSGGSSGGSMSEVEFSHEYWMRHALTLAKRARDEREVPVGAVLVLNNRVIGEGWNRAIGLHDPTAHAEIMALRQGGLVMQNYRLIDATLYVTFEPCVMCAGAMIHSRIGRVVFGVRNAKTGAAGSLMDVLHYPGMNHRVEITEGILADECAALLCTFFRMPRQVFNAQKKAQSSTDSGGSSGGSSGSETPGTSESATPESSGGSSGGSEIGKATAKYFFYSNIMNFFKTEITLANGEIRKRPLIETNGETGEIVWDKGRDFATVRKVLSMPQVNIVKKTEVQTGGFSKESILPKRNSDKLIARKKDWDPKKYGGFMQPTVAYSVLVVAKVEKGKSKKLKSVKELLGITIMERSSFEKNPIDFLEAKGYKEVKKDLIIKLPKYSLFELENGRKRMLASAKFLQKGNELALPSKYVNFLYLASHYEKLKGSPEDNEQKQLFVEQHKHYLDEIIEQISEFSKRVILADANLDKVLSAYNKHRDKPIREQAENIIHLFTLTNLGAPRAFKYFDTTIARKEYRSTKEVLDATLIHQSITGLYETRIDLSQLGGDGGSGGSGGSGGSGGSGGSGGMDKKYSIGLAIGTNSVGWAVITDEYKVPSKKFKVLGNTDRHSIKKNLIGALLFDSGETAEATRLKRTARRRYTRRKNRICYLQEIFSNEMAKVDDSFFHRLEESFLVEEDKKHERHPIFGNIVDEVAYHEKYPTIYHLRKKLVDSTDKADLRLIYLALAHMIKFRGHFLIEGDLNPDNSDVDKLFIQLVQTYNQLFEENPINASGVDAKAILSARLSKSRRLENLIAQLPGEKKNGLFGNLIALSLGLTPNFKSNFDLAEDAKLQLSKDTYDDDLDNLLAQIGDQYADLFLAAKNLSDAILLSDILRVNTEITKAPLSASMIKRYDEHHQDLTLLKALVRQQLPEKYKEIFFDQSKNGYAGYIDGGASQEEFYKFIKPILEKMDGTEELLVKLNREDLLRKQRTFDNGSIPHQIHLGELHAILRRQEDFYPFLKDNREKIEKILTFRIPYYVGPLARGNSRFAWMTRKSEETITPWNFEEVVDKGASAQSFIERMTNFDKNLPNEKVLPKHSLLYEYFTVYNELTKVKYVTEGMRKPAFLSGEQKKAIVDLLFKTNRKVTVKQLKEDYFKKIECFDSVEISGVEDRFNASLGTYHDLLKIIKDKDFLDNEENEDILEDIVLTLTLFEDREMIEERLKTYAHLFDDKVMKQLKRRRYTGWGRLSRKLINGIRDKQSGKTILDFLKSDGFANRNFMQLIHDDSLTFKEDIQKAQVSGQGDSLHEHIANLAGSPAIKKGILQTVKVVDELVKVMGRHKPENIVIEMARENQTTQKGQKNSRERMKRIEEGIKELGSQILKEHPVENTQLQNEKLYLYYLQNGRDMYVDQELDINRLSDYDVDHIVPQSFLKDDSIDNKVLTRSDKNRGKSDNVPSEEVVKKMKNYWRQLLNAKLITQRKFDNLTKAERGGLSELDKAGFIKRQLVETRQITKHVAQILDSRMNTKYDENDKLIREVKVITLKSKLVSDFRKDFQFYKVREINNYHHAHDAYLNAVVGTALIKKYPKLESEFVYGDYKVYDVRKMIAKSEQEGADKRTADGSEFESPKKKRKV

SEQ ID NO: 333 - protein, 1588 aa, synthetic construct
  REGION 1..1588: note = ABE8.8-m polypeptide sequence
  REGION 1..167: note = MISC_FEATURE - Adenosine deaminase sequence
  REGION 168..199: note = MISC_FEATURE - Linker sequence
  REGION 200..1566: note = MISC_FEATURE - Sequence derived from Cas9
  REGION 1567..1588: note = MISC_FEATURE - Bipartite nuclear localization sequence
MSEVEFSHEYWMRHALTLAKRARDEREVPVGAVLVLNNRVIGEGWNRAIGLHDPTAHAEIMALRQGGLVMQNYRLIDATLYVTFEPCVMCAGAMIHSRIGRVVFGVRNAKTGAAGSLMDVLHHPGMNHRVEITEGILADECAALLCRFFRMPRRVFNAQKKAQSSTDSGGSSGGSSGSETPGTSESATPESSGGSSGGSDKKYSIGLAIGTNSVGWAVITDEYKVPSKKFKVLGNTDRHSIKKNLIGALLFDSGETAEATRLKRTARRRYTRRKNRICYLQEIFSNEMAKVDDSFFHRLEESFLVEEDKKHERHPIFGNIVDEVAYHEKYPTIYHLRKKLVDSTDKADLRLIYLALAHMIKFRGHFLIEGDLNPDNSDVDKLFIQLVQTYNQLFEENPINASGVDAKAILSARLSKSRRLENLIAQLPGEKKNGLFGNLIALSLGLTPNFKSNFDLAEDAKLQLSKDTYDDDLDNLLAQIGDQYADLFLAAKNLSDAILLSDILRVNTEITKAPLSASMIKRYDEHHQDLTLLKALVRQQLPEKYKEIFFDQSKNGYAGYIDGGASQEEFYKFIKPILEKMDGTEELLVKLNREDLLRKQRTFDNGSIPHQIHLGELHAILRRQEDFYPFLKDNREKIEKILTFRIPYYVGPLARGNSRFAWMTRKSEETITPWNFEEVVDKGASAQSFIERMTNFDKNLPNEKVLPKHSLLYEYFTVYNELTKVKYVTEGMRKPAFLSGEQKKAIVDLLFKTNRKVTVKQLKEDYFKKIECFDSVEISGVEDRFNASLGTYHDLLKIIKDKDFLDNEENEDILEDIVLTLTLFEDREMIEERLKTYAHLFDDKVMKQLKRRRYTGWGRLSRKLINGIRDKQSGKTILDFLKSDGFANRNFMQLIHDDSLTFKEDIQKAQVSGQGDSLHEHIANLAGSPAIKKGILQTVKVVDELVKVMGRHKPENIVIEMARENQTTQKGQKNSRERMKRIEEGIKELGSQILKEHPVENTQLQNEKLYLYYLQNGRDMYVDQELDINRLSDYDVDHIVPQSFLKDDSIDNKVLTRSDKNRGKSDNVPSEEVVKKMKNYWRQLLNAKLITQRKFDNLTKAERGGLSELDKAGFIKRQLVETRQITKHVAQILDSRMNTKYDENDKLIREVKVITLKSKLVSDFRKDFQFYKVREINNYHHAHDAYLNAVVGTALIKKYPKLESEFVYGDYKVYDVRKMIAKSEQEIGKATAKYFFYSNIMNFFKTEITLANGEIRKRPLIETNGETGEIVWDKGRDFATVRKVLSMPQVNIVKKTEVQTGGFSKESILPKRNSDKLIARKKDWDPKKYGGFDSPTVAYSVLVVAKVEKGKSKKLKSVKELLGITIMERSSFEKNPIDFLEAKGYKEVKKDLIIKLPKYSLFELENGRKRMLASAGELQKGNELALPSKYVNFLYLASHYEKLKGSPEDNEQKQLFVEQHKHYLDEIIEQISEFSKRVILADANLDKVLSAYNKHRDKPIREQAENIIHLFTLTNLGAPAAFKYFDTTIDRKRYTSTKEVLDATLIHQSITGLYETRIDLSQLGGDEGADKRTADGSEFESPKKKRKV

SEQ ID NO: 334 - protein, 1786 aa, synthetic construct
  REGION 1..1786: note = ABE8.8-d polypeptide sequence
  REGION 1..167: note = MISC_FEATURE - Adenosine deaminase sequence
  REGION 168..199: note = MISC_FEATURE - Linker sequence
  REGION 200..365: note = MISC_FEATURE - Adenosine deaminase sequence
  REGION 366..397: note = MISC_FEATURE - Linker sequence
  REGION 398..1764: note = MISC_FEATURE - Sequence derived from Cas9
  REGION 1765..1786: note = MISC_FEATURE - Bipartite nuclear localization sequence
MSEVEFSHEYWMRHALTLAKRAWDEREVPVGAVLVHNNRVIGEGWNRPIGRHDPTAHAEIMALRQGGLVMQNYRLIDATLYVTLEPCVMCAGAMIHSRIGRVVFGARDAKTGAAGSLMDVLHHPGMNHRVEITEGILADECAALLSDFFRMRRQEIKAQKKAQSSTDSGGSSGGSSGSETPGTSESATPESSGGSSGGSSEVEFSHEYWMRHALTLAKRARDEREVPVGAVLVLNNRVIGEGWNRAIGLHDPTAHAEIMALRQGGLVMQNYRLIDATLYVTFEPCVMCAGAMIHSRIGRVVFGVRNAKTGAAGSLMDVLHHPGMNHRVEITEGILADECAALLCRFFRMPRRVFNAQKKAQSSTDSGGSSGGSSGSETPGTSESATPESSGGSSGGSDKKYSIGLAIGTNSVGWAVITDEYKVPSKKFKVLGNTDRHSIKKNLIGALLFDSGETAEATRLKRTARRRYTRRKNRICYLQEIFSNEMAKVDDSFFHRLEESFLVEEDKKHERHPIFGNIVDEVAYHEKYPTIYHLRKKLVDSTDKADLRLIYLALAHMIKFRGHFLIEGDLNPDNSDVDKLFIQLVQTYNQLFEENPINASGVDAKAILSARLSKSRRLENLIAQLPGEKKNGLFGNLIALSLGLTPNFKSNFDLAEDAKLQLSKDTYDDDLDNLLAQIGDQYADLFLAAKNLSDAILLSDILRVNTEITKAPLSASMIKRYDEHHQDLTLLKALVRQQLPEKYKEIFFDQSKNGYAGYIDGGASQEEFYKFIKPILEKMDGTEELLVKLNREDLLRKQRTFDNGSIPHQIHLGELHAILRRQEDFYPFLKDNREKIEKILTFRIPYYVGPLARGNSRFAWMTRKSEETITPWNFEEVVDKGASAQSFIERMTNFDKNLPNEKVLPKHSLLYEYFTVYNELTKVKYVTEGMRKPAFLSGEQKKAIVDLLFKTNRKVTVKQLKEDYFKKIECFDSVEISGVEDRFNASLGTYHDLLKIIKDKDFLDNEENEDILEDIVLTLTLFEDREMIEERLKTYAHLFDDKVMKQLKRRRYTGWGRLSRKLINGIRDKQSGKTILDFLKSDGFANRNFMQLIHDDSLTFKEDIQKAQVSGQGDSLHEHIANLAGSPAIKKGILQTVKVVDELVKVMGRHKPENIVIEMARENQTTQKGQKNSRERMKRIEEGIKELGSQILKEHPVENTQLQNEKLYLYYLQNGRDMYVDQELDINRLSDYDVDHIVPQSFLKDDSIDNKVLTRSDKNRGKSDNVPSEEVVKKMKNYWRQLLNAKLITQRKFDNLTKAERGGLSELDKAGFIKRQLVETRQITKHVAQILDSRMNTKYDENDKLIREVKVITLKSKLVSDFRKDFQFYKVREINNYHHAHDAYLNAVVGTALIKKYPKLESEFVYGDYKVYDVRKMIAKSEQEIGKATAKYFFYSNIMNFFKTEITLANGEIRKRPLIETNGETGEIVWDKGRDFATVRKVLSMPQVNIVKKTEVQTGGFSKESILPKRNSDKLIARKKDWDPKKYGGFDSPTVAYSVLVVAKVEKGKSKKLKSVKELLGITIMERSSFEKNPIDFLEAKGYKEVKKDLIIKLPKYSLFELENGRKRMLASAGELQKGNELALPSKYVNFLYLASHYEKLKGSPEDNEQKQLFVEQHKHYLDEIIEQISEFSKRVILADANLDKVLSAYNKHRDKPIREQAENIIHLFTLTNLGAPAAFKYFDTTIDRKRYTSTKEVLDATLIHQSITGLYETRIDLSQLGGDEGADKRTADGSEFESPKKKRKV

SEQ ID NO: 335 - protein, 1588 aa, synthetic construct
  REGION 1..1588: note = ABE8.13-m polypeptide sequence
  REGION 1..167: note = MISC_FEATURE - Adenosine deaminase sequence
  REGION 168..199: note = MISC_FEATURE - Linker sequence
  REGION 200..1566: note = MISC_FEATURE - Sequence derived from Cas9
  REGION 1567..1588: note = MISC_FEATURE - Bipartite nuclear localization sequence
MSEVEFSHEYWMRHALTLAKRARDEREVPVGAVLVLNNRVIGEGWNRAIGLHDPTAHAEIMALRQGGLVMQNYRLYDATLYVTFEPCVMCAGAMIHSRIGRVVFGVRNAKTGAAGSLMDVLHHPGMNHRVEITEGILADECAALLCRFFRMPRRVFNAQKKAQSSTDSGGSSGGSSGSETPGTSESATPESSGGSSGGSDKKYSIGLAIGTNSVGWAVITDEYKVPSKKFKVLGNTDRHSIKKNLIGALLFDSGETAEATRLKRTARRRYTRRKNRICYLQEIFSNEMAKVDDSFFHRLEESFLVEEDKKHERHPIFGNIVDEVAYHEKYPTIYHLRKKLVDSTDKADLRLIYLALAHMIKFRGHFLIEGDLNPDNSDVDKLFIQLVQTYNQLFEENPINASGVDAKAILSARLSKSRRLENLIAQLPGEKKNGLFGNLIALSLGLTPNFKSNFDLAEDAKLQLSKDTYDDDLDNLLAQIGDQYADLFLAAKNLSDAILLSDILRVNTEITKAPLSASMIKRYDEHHQDLTLLKALVRQQLPEKYKEIFFDQSKNGYAGYIDGGASQEEFYKFIKPILEKMDGTEELLVKLNREDLLRKQRTFDNGSIPHQIHLGELHAILRRQEDFYPFLKDNREKIEKILTFRIPYYVGPLARGNSRFAWMTRKSEETITPWNFEEVVDKGASAQSFIERMTNFDKNLPNEKVLPKHSLLYEYFTVYNELTKVKYVTEGMRKPAFLSGEQKKAIVDLLFKTNRKVTVKQLKEDYFKKIECFDSVEISGVEDRFNASLGTYHDLLKIIKDKDFLDNEENEDILEDIVLTLTLFEDREMIEERLKTYAHLFDDKVMKQLKRRRYTGWGRLSRKLINGIRDKQSGKTILDFLKSDGFANRNFMQLIHDDSLTFKEDIQKAQVSGQGDSLHEHIANLAGSPAIKKGILQTVKVVDELVKVMGRHKPENIVIEMARENQTTQKGQKNSRERMKRIEEGIKELGSQILKEHPVENTQLQNEKLYLYYLQNGRDMYVDQELDINRLSDYDVDHIVPQSFLKDDSIDNKVLTRSDKNRGKSDNVPSEEVVKKMKNYWRQLLNAKLITQRKFDNLTKAERGGLSELDKAGFIKRQLVETRQITKHVAQILDSRMNTKYDENDKLIREVKVITLKSKLVSDFRKDFQFYKVREINNYHHAHDAYLNAVVGTALIKKYPKLESEFVYGDYKVYDVRKMIAKSEQEIGKATAKYFFYSNIMNFFKTEITLANGEIRKRPLIETNGETGEIVWDKGRDFATVRKVLSMPQVNIVKKTEVQTGGFSKESILPKRNSDKLIARKKDWDPKKYGGFDSPTVAYSVLVVAKVEKGKSKKLKSVKELLGITIMERSSFEKNPIDFLEAKGYKEVKKDLIIKLPKYSLFELENGRKRMLASAGELQKGNELALPSKYVNFLYLASHYEKLKGSPEDNEQKQLFVEQHKHYLDEIIEQISEFSKRVILADANLDKVLSAYNKHRDKPIREQAENIIHLFTLTNLGAPAAFKYFDTTIDRKRYTSTKEVLDATLIHQSITGLYETRIDLSQLGGDEGADKRTADGSEFESPKKKRKV

SEQ ID NO: 336 - protein, 1786 aa, synthetic construct
  REGION 1..1786: note = ABE8.13-d polypeptide sequence
  REGION 1..167: note = MISC_FEATURE - Adenosine deaminase sequence
  REGION 168..199: note = MISC_FEATURE - Linker sequence
  REGION 200..365: note = MISC_FEATURE - Adenosine deaminase sequence
  REGION 366..397: note = MISC_FEATURE - Linker sequence
  REGION 398..1764: note = MISC_FEATURE - Sequence derived from Cas9
  REGION 1765..1786: note = MISC_FEATURE - Bipartite nuclear localization sequence
MSEVEFSHEYWMRHALTLAKRAWDEREVPVGAVLVHNNRVIGEGWNRPIGRHDPTAHAEIMALRQGGLVMQNYRLIDATLYVTLEPCVMCAGAMIHSRIGRVVFGARDAKTGAAGSLMDVLHHPGMNHRVEITEGILADECAALLSDFFRMRRQEIKAQKKAQSSTDSGGSSGGSSGSETPGTSESATPESSGGSSGGSSEVEFSHEYWMRHALTLAKRARDEREVPVGAVLVLNNRVIGEGWNRAIGLHDPTAHAEIMALRQGGLVMQNYRLYDATLYVTFEPCVMCAGAMIHSRIGRVVFGVRNAKTGAAGSLMDVLHHPGMNHRVEITEGILADECAALLCRFFRMPRRVFNAQKKAQSSTDSGGSSGGSSGSETPGTSESATPESSGGSSGGSDKKYSIGLAIGTNSVGWAVITDEYKVPSKKFKVLGNTDRHSIKKNLIGALLFDSGETAEATRLKRTARRRYTRRKNRICYLQEIFSNEMAKVDDSFFHRLEESFLVEEDKKHERHPIFGNIVDEVAYHEKYPTIYHLRKKLVDSTDKADLRLIYLALAHMIKFRGHFLIEGDLNPDNSDVDKLFIQLVQTYNQLFEENPINASGVDAKAILSARLSKSRRLENLIAQLPGEKKNGLFGNLIALSLGLTPNFKSNFDLAEDAKLQLSKDTYDDDLDNLLAQIGDQYADLFLAAKNLSDAILLSDILRVNTEITKAPLSASMIKRYDEHHQDLTLLKALVRQQLPEKYKEIFFDQSKNGYAGYIDGGASQEEFYKFIKPILEKMDGTEELLVKLNREDLLRKQRTFDNGSIPHQIHLGELHAILRRQEDFYPFLKDNREKIEKILTFRIPYYVGPLARGNSRFAWMTRKSEETITPWNFEEVVDKGASAQSFIERMTNFDKNLPNEKVLPKHSLLYEYFTVYNELTKVKYVTEGMRKPAFLSGEQKKAIVDLLFKTNRKVTVKQLKEDYFKKIECFDSVEISGVEDRFNASLGTYHDLLKIIKDKDFLDNEENEDILEDIVLTLTLFEDREMIEERLKTYAHLFDDKVMKQLKRRRYTGWGRLSRKLINGIRDKQSGKTILDFLKSDGFANRNFMQLIHDDSLTFKEDIQKAQVSGQGDSLHEHIANLAGSPAIKKGILQTVKVVDELVKVMGRHKPENIVIEMARENQTTQKGQKNSRERMKRIEEGIKELGSQILKEHPVENTQLQNEKLYLYYLQNGRDMYVDQELDINRLSDYDVDHIVPQSFLKDDSIDNKVLTRSDKNRGKSDNVPSEEVVKKMKNYWRQLLNAKLITQRKFDNLTKAERGGLSELDKAGFIKRQLVETRQITKHVAQILDSRMNTKYDENDKLIREVKVITLKSKLVSDFRKDFQFYKVREINNYHHAHDAYLNAVVGTALIKKYPKLESEFVYGDYKVYDVRKMIAKSEQEIGKATAKYFFYSNIMNFFKTEITLANGEIRKRPLIETNGETGEIVWDKGRDFATVRKVLSMPQVNIVKKTEVQTGGFSKESILPKRNSDKLIARKKDWDPKKYGGFDSPTVAYSVLVVAKVEKGKSKKLKSVKELLGITIMERSSFEKNPIDFLEAKGYKEVKKDLIIKLPKYSLFELENGRKRMLASAGELQKGNELALPSKYVNFLYLASHYEKLKGSPEDNEQKQLFVEQHKHYLDEIIEQISEFSKRVILADANLDKVLSAYNKHRDKPIREQAENIIHLFTLTNLGAPAAFKYFDTTIDRKRYTSTKEVLDATLIHQSITGLYETRIDLSQLGGDEGADKRTADGSEFESPKKKRKV

SEQ ID NO: 337 - protein, 1588 aa, synthetic construct
  REGION 1..1588: note = ABE8.17-m polypeptide sequence
  REGION 1..167: note = MISC_FEATURE - Adenosine deaminase sequence
  REGION 168..199: note = MISC_FEATURE - Linker sequence
  REGION 200..1566: note = MISC_FEATURE - Sequence derived from Cas9
  REGION 1567..1588: note = MISC_FEATURE - Bipartite nuclear localization sequence
MSEVEFSHEYWMRHALTLAKRARDEREVPVGAVLVLNNRVIGEGWNRAIGLHDPTAHAEIMALRQGGLVMQNYRLIDATLYSTFEPCVMCAGAMIHSRIGRVVFGVRNAKTGAAGSLMDVLHYPGMNHRVEITEGILADECAALLCYFFRMPRRVFNAQKKAQSSTDSGGSSGGSSGSETPGTSESATPESSGGSSGGSDKKYSIGLAIGTNSVGWAVITDEYKVPSKKFKVLGNTDRHSIKKNLIGALLFDSGETAEATRLKRTARRRYTRRKNRICYLQEIFSNEMAKVDDSFFHRLEESFLVEEDKKHERHPIFGNIVDEVAYHEKYPTIYHLRKKLVDSTDKADLRLIYLALAHMIKFRGHFLIEGDLNPDNSDVDKLFIQLVQTYNQLFEENPINASGVDAKAILSARLSKSRRLENLIAQLPGEKKNGLFGNLIALSLGLTPNFKSNFDLAEDAKLQLSKDTYDDDLDNLLAQIGDQYADLFLAAKNLSDAILLSDILRVNTEITKAPLSASMIKRYDEHHQDLTLLKALVRQQLPEKYKEIFFDQSKNGYAGYIDGGASQEEFYKFIKPILEKMDGTEELLVKLNREDLLRKQRTFDNGSIPHQIHLGELHAILRRQEDFYPFLKDNREKIEKILTFRIPYYVGPLARGNSRFAWMTRKSEETITPWNFEEVVDKGASAQSFIERMTNFDKNLPNEKVLPKHSLLYEYFTVYNELTKVKYVTEGMRKPAFLSGEQKKAIVDLLFKTNRKVTVKQLKEDYFKKIECFDSVEISGVEDRFNASLGTYHDLLKIIKDKDFLDNEENEDILEDIVLTLTLFEDREMIEERLKTYAHLFDDKVMKQLKRRRYTGWGRLSRKLINGIRDKQSGKTILDFLKSDGFANRNFMQLIHDDSLTFKEDIQKAQVSGQGDSLHEHIANLAGSPAIKKGILQTVKVVDELVKVMGRHKPENIVIEMARENQTTQKGQKNSRERMKRIEEGIKELGSQILKEHPVENTQLQNEKLYLYYLQNGRDMYVDQELDINRLSDYDVDHIVPQSFLKDDSIDNKVLTRSDKNRGKSDNVPSEEVVKKMKNYWRQLLNAKLITQRKFDNLTKAERGGLSELDKAGFIKRQLVETRQITKHVAQILDSRMNTKYDENDKLIREVKVITLKSKLVSDFRKDFQFYKVREINNYHHAHDAYLNAVVGTALIKKYPKLESEFVYGDYKVYDVRKMIAKSEQEIGKATAKYFFYSNIMNFFKTEITLANGEIRKRPLIETNGETGEIVWDKGRDFATVRKVLSMPQVNIVKKTEVQTGGFSKESILPKRNSDKLIARKKDWDPKKYGGFDSPTVAYSVLVVAKVEKGKSKKLKSVKELLGITIMERSSFEKNPIDFLEAKGYKEVKKDLIIKLPKYSLFELENGRKRMLASAGELQKGNELALPSKYVNFLYLASHYEKLKGSPEDNEQKQLFVEQHKHYLDEIIEQISEFSKRVILADANLDKVLSAYNKHRDKPIREQAENIIHLFTLTNLGAPAAFKYFDTTIDRKRYTSTKEVLDATLIHQSITGLYETRIDLSQLGGDEGADKRTADGSEFESPKKKRKV

SEQ ID NO: 338 - protein, 1786 aa, synthetic construct
  REGION 1..1786: note = ABE8.17-d polypeptide sequence
  REGION 1..167: note = MISC_FEATURE - Adenosine deaminase sequence
  REGION 168..199: note = MISC_FEATURE - Linker sequence
  REGION 200..365: note = MISC_FEATURE - Adenosine deaminase sequence
  REGION 366..397: note = MISC_FEATURE - Linker sequence
  REGION 398..1764: note = MISC_FEATURE - Sequence derived from Cas9
  REGION 1765..1786: note = MISC_FEATURE - Bipartite nuclear localization sequence
MSEVEFSHEYWMRHALTLAKRAWDEREVPVGAVLVHNNRVIGEGWNRPIGRHDPTAHAEIMALRQGGLVMQNYRLIDATLYVTLEPCVMCAGAMIHSRIGRVVFGARDAKTGAAGSLMDVLHHPGMNHRVEITEGILADECAALLSDFFRMRRQEIKAQKKAQSSTDSGGSSGGSSGSETPGTSESATPESSGGSSGGSSEVEFSHEYWMRHALTLAKRARDEREVPVGAVLVLNNRVIGEGWNRAIGLHDPTAHAEIMALRQGGLVMQNYRLIDATLYSTFEPCVMCAGAMIHSRIGRVVFGVRNAKTGAAGSLMDVLHYPGMNHRVEITEGILADECAALLCYFFRMPRRVFNAQKKAQSSTDSGGSSGGSSGSETPGTSESATPESSGGSSGGSDKKYSIGLAIGTNSVGWAVITDEYKVPSKKFKVLGNTDRHSIKKNLIGALLFDSGETAEATRLKRTARRRYTRRKNRICYLQEIFSNEMAKVDDSFFHRLEESFLVEEDKKHERHPIFGNIVDEVAYHEKYPTIYHLRKKLVDSTDKADLRLIYLALAHMIKFRGHFLIEGDLNPDNSDVDKLFIQLVQTYNQLFEENPINASGVDAKAILSARLSKSRRLENLIAQLPGEKKNGLFGNLIALSLGLTPNFKSNFDLAEDAKLQLSKDTYDDDLDNLLAQIGDQYADLFLAAKNLSDAILLSDILRVNTEITKAPLSASMIKRYDEHHQDLTLLKALVRQQLPEKYKEIFFDQSKNGYAGYIDGGASQEEFYKFIKPILEKMDGTEELLVKLNREDLLRKQRTFDNGSIPHQIHLGELHAILRRQEDFYPFLKDNREKIEKILTFRIPYYVGPLARGNSRFAWMTRKSEETITPWNFEEVVDKGASAQSFIERMTNFDKNLPNEKVLPKHSLLYEYFTVYNELTKVKYVTEGMRKPAFLSGEQKKAIVDLLFKTNRKVTVKQLKEDYFKKIECFDSVEISGVEDRFNASLGTYHDLLKIIKDKDFLDNEENEDILEDIVLTLTLFEDREMIEERLKTYAHLFDDKVMKQLKRRRYTGWGRLSRKLINGIRDKQSGKTILDFLKSDGFANRNFMQLIHDDSLTFKEDIQKAQVSGQGDSLHEHIANLAGSPAIKKGILQTVKVVDELVKVMGRHKPENIVIEMARENQTTQKGQKNSRERMKRIEEGIKELGSQILKEHPVENTQLQNEKLYLYYLQNGRDMYVDQELDINRLSDYDVDHIVPQSFLKDDSIDNKVLTRSDKNRGKSDNVPSEEVVKKMKNYWRQLLNAKLITQRKFDNLTKAERGGLSELDKAGFIKRQLVETRQITKHVAQILDSRMNTKYDENDKLIREVKVITLKSKLVSDFRKDFQFYKVREINNYHHAHDAYLNAVVGTALIKKYPKLESEFVYGDYKVYDVRKMIAKSEQEIGKATAKYFFYSNIMNFFKTEITLANGEIRKRPLIETNGETGEIVWDKGRDFATVRKVLSMPQVNIVKKTEVQTGGFSKESILPKRNSDKLIARKKDWDPKKYGGFDSPTVAYSVLVVAKVEKGKSKKLKSVKELLGITIMERSSFEKNPIDFLEAKGYKEVKKDLIIKLPKYSLFELENGRKRMLASAGELQKGNELALPSKYVNFLYLASHYEKLKGSPEDNEQKQLFVEQHKHYLDEIIEQISEFSKRVILADANLDKVLSAYNKHRDKPIREQAENIIHLFTLTNLGAPAAFKYFDTTIDRKRYTSTKEVLDATLIHQSITGLYETRIDLSQLGGDEGADKRTADGSEFESPKKKRKV

SEQ ID NO: 339 - protein, 1588 aa, synthetic construct
  REGION 1..1588: note = ABE8.20-m polypeptide sequence
  REGION 1..167: note = MISC_FEATURE - Adenosine deaminase sequence
  REGION 168..199: note = MISC_FEATURE - Linker sequence
  REGION 200..1566: note = MISC_FEATURE - Sequence derived from Cas9
  REGION 1567..1588: note = MISC_FEATURE - Bipartite nuclear localization sequence
MSEVEFSHEYWMRHALTLAKRARDEREVPVGAVLVLNNRVIGEGWNRAIGLHDPTAHAEIMALRQGGLVMQNYRLYDATLYSTFEPCVMCAGAMIHSRIGRVVFGVRNAKTGAAGSLMDVLHHPGMNHRVEITEGILADECAALLCRFFRMPRRVFNAQKKAQSSTDSGGSSGGSSGSETPGTSESATPESSGGSSGGSDKKYSIGLAIGTNSVGWAVITDEYKVPSKKFKVLGNTDRHSIKKNLIGALLFDSGETAEATRLKRTARRRYTRRKNRICYLQEIFSNEMAKVDDSFFHRLEESFLVEEDKKHERHPIFGNIVDEVAYHEKYPTIYHLRKKLVDSTDKADLRLIYLALAHMIKFRGHFLIEGDLNPDNSDVDKLFIQLVQTYNQLFEENPINASGVDAKAILSARLSKSRRLENLIAQLPGEKKNGLFGNLIALSLGLTPNFKSNFDLAEDAKLQLSKDTYDDDLDNLLAQIGDQYADLFLAAKNLSDAILLSDILRVNTEITKAPLSASMIKRYDEHHQDLTLLKALVRQQLPEKYKEIFFDQSKNGYAGYIDGGASQEEFYKFIKPILEKMDGTEELLVKLNREDLLRKQRTFDNGSIPHQIHLGELHAILRRQEDFYPFLKDNREKIEKILTFRIPYYVGPLARGNSRFAWMTRKSEETITPWNFEEVVDKGASAQSFIERMTNFDKNLPNEKVLPKHSLLYEYFTVYNELTKVKYVTEGMRKPAFLSGEQKKAIVDLLFKTNRKVTVKQLKEDYFKKIECFDSVEISGVEDRFNASLGTYHDLLKIIKDKDFLDNEENEDILEDIVLTLTLFEDREMIEERLKTYAHLFDDKVMKQLKRRRYTGWGRLSRKLINGIRDKQSGKTILDFLKSDGFANRNFMQLIHDDSLTFKEDIQKAQVSGQGDSLHEHIANLAGSPAIKKGILQTVKVVDELVKVMGRHKPENIVIEMARENQTTQKGQKNSRERMKRIEEGIKELGSQILKEHPVENTQLQNEKLYLYYLQNGRDMYVDQELDINRLSDYDVDHIVPQSFLKDDSIDNKVLTRSDKNRGKSDNVPSEEVVKKMKNYWRQLLNAKLITQRKFDNLTKAERGGLSELDKAGFIKRQLVETRQITKHVAQILDSRMNTKYDENDKLIREVKVITLKSKLVSDFRKDFQFYKVREINNYHHAHDAYLNAVVGTALIKKYPKLESEFVYGDYKVYDVRKMIAKSEQEIGKATAKYFFYSNIMNFFKTEITLANGEIRKRPLIETNGETGEIVWDKGRDFATVRKVLSMPQVNIVKKTEVQTGGFSKESILPKRNSDKLIARKKDWDPKKYGGFDSPTVAYSVLVVAKVEKGKSKKLKSVKELLGITIMERSSFEKNPIDFLEAKGYKEVKKDLIIKLPKYSLFELENGRKRMLASAGELQKGNELALPSKYVNFLYLASHYEKLKGSPEDNEQKQLFVEQHKHYLDEIIEQISEFSKRVILADANLDKVLSAYNKHRDKPIREQAENIIHLFTLTNLGAPAAFKYFDTTIDRKRYTSTKEVLDATLIHQSITGLYETRIDLSQLGGDEGADKRTADGSEFESPKKKRKV

SEQ ID NO: 340 - protein, 1786 aa, synthetic construct
  REGION 1..1786: note = ABE8.20-d polypeptide sequence
  REGION 1..167: note = MISC_FEATURE - Adenosine deaminase sequence
  REGION 168..199: note = MISC_FEATURE - Linker sequence
  REGION 200..365: note = MISC_FEATURE - Adenosine deaminase sequence
  REGION 366..397: note = MISC_FEATURE - Linker sequence
  REGION 398..1764: note = MISC_FEATURE - Sequence derived from Cas9
  REGION 1765..1786: note = MISC_FEATURE - Bipartite nuclear localization sequence
MSEVEFSHEYWMRHALTLAKRAWDEREVPVGAVLVHNNRVIGEGWNRPIGRHDPTAHAEIMALRQGGLVMQNYRLIDATLYVTLEPCVMCAGAMIHSRIGRVVFGARDAKTGAAGSLMDVLHHPGMNHRVEITEGILADECAALLSDFFRMRRQEIKAQKKAQSSTDSGGSSGGSSGSETPGTSESATPESSGGSSGGSSEVEFSHEYWMRHALTLAKRARDEREVPVGAVLVLNNRVIGEGWNRAIGLHDPTAHAEIMALRQGGLVMQNYRLYDATLYSTFEPCVMCAGAMIHSRIGRVVFGVRNAKTGAAGSLMDVLHHPGMNHRVEITEGILADECAALLCRFFRMPRRVFNAQKKAQSSTDSGGSSGGSSGSETPGTSESATPESSGGSSGGSDKKYSIGLAIGTNSVGWAVITDEYKVPSKKFKVLGNTDRHSIKKNLIGALLFDSGETAEATRLKRTARRRYTRRKNRICYLQEIFSNEMAKVDDSFFHRLEESFLVEEDKKHERHPIFGNIVDEVAYHEKYPTIYHLRKKLVDSTDKADLRLIYLALAHMIKFRGHFLIEGDLNPDNSDVDKLFIQLVQTYNQLFEENPINASGVDAKAILSARLSKSRRLENLIAQLPGEKKNGLFGNLIALSLGLTPNFKSNFDLAEDAKLQLSKDTYDDDLDNLLAQIGDQYADLFLAAKNLSDAILLSDILRVNTEITKAPLSASMIKRYDEHHQDLTLLKALVRQQLPEKYKEIFFDQSKNGYAGYIDGGASQEEFYKFIKPILEKMDGTEELLVKLNREDLLRKQRTFDNGSIPHQIHLGELHAILRRQEDFYPFLKDNREKIEKILTFRIPYYVGPLARGNSRFAWMTRKSEETITPWNFEEVVDKGASAQSFIERMTNFDKNLPNEKVLPKHSLLYEYFTVYNELTKVKYVTEGMRKPAFLSGEQKKAIVDLLFKTNRKVTVKQLKEDYFKKIECFDSVEISGVEDRFNASLGTYHDLLKIIKDKDFLDNEENEDILEDIVLTLTLFEDREMIEERLKTYAHLFDDKVMKQLKRRRYTGWGRLSRKLINGIRDKQSGKTILDFLKSDGFANRNFMQLIHDDSLTFKEDIQKAQVSGQGDSLHEHIANLAGSPAIKKGILQTVKVVDELVKVMGRHKPENIVIEMARENQTTQKGQKNSRERMKRIEEGIKELGSQILKEHPVENTQLQNEKLYLYYLQNGRDMYVDQELDINRLSDYDVDHIVPQSFLKDDSIDNKVLTRSDKNRGKSDNVPSEEVVKKMKNYWRQLLNAKLITQRKFDNLTKAERGGLSELDKAGFIKRQLVETRQITKHVAQILDSRMNTKYDENDKLIREVKVITLKSKLVSDFRKDFQFYKVREINNYHHAHDAYLNAVVGTALIKKYPKLESEFVYGDYKVYDVRKMIAKSEQEIGKATAKYFFYSNIMNFFKTEITLANGEIRKRPLIETNGETGEIVWDKGRDFATVRKVLSMPQVNIVKKTEVQTGGFSKESILPKRNSDKLIARKKDWDPKKYGGFDSPTVAYSVLVVAKVEKGKSKKLKSVKELLGITIMERSSFEKNPIDFLEAKGYKEVKKDLIIKLPKYSLFELENGRKRMLASAGELQKGNELALPSKYVNFLYLASHYEKLKGSPEDNEQKQLFVEQHKHYLDEIIEQISEFSKRVILADANLDKVLSAYNKHRDKPIREQAENIIHLFTLTNLGAPAAFKYFDTTIDRKRYTSTKEVLDATLIHQSITGLYETRIDLSQLGGDEGADKRTADGSEFESPKKKRKV

SEQ ID NO: 341 - protein, 1588 aa, synthetic construct
  REGION 1..1588: note = 01. monoABE8.1_bpNLS + Y147T polypeptide sequence
MSEVEFSHEYWMRHALTLAKRARDEREVPVGAVLVLNNRVIGEGWNRAIGLHDPTAHAEIMALRQGGLVMQNYRLIDATLYVTFEPCVMCAGAMIHSRIGRVVFGVRNAKTGAAGSLMDVLHYPGMNHRVEITEGILADECAALLCTFFRMPRQVFNAQKKAQSSTDSGGSSGGSSGSETPGTSESATPESSGGSSGGSDKKYSIGLAIGTNSVGWAVITDEYKVPSKKFKVLGNTDRHSIKKNLIGALLFDSGETAEATRLKRTARRRYTRRKNRICYLQEIFSNEMAKVDDSFFHRLEESFLVEEDKKHERHPIFGNIVDEVAYHEKYPTIYHLRKKLVDSTDKADLRLIYLALAHMIKFRGHFLIEGDLNPDNSDVDKLFIQLVQTYNQLFEENPINASGVDAKAILSARLSKSRRLENLIAQLPGEKKNGLFGNLIALSLGLTPNFKSNFDLAEDAKLQLSKDTYDDDLDNLLAQIGDQYADLFLAAKNLSDAILLSDILRVNTEITKAPLSASMIKRYDEHHQDLTLLKALVRQQLPEKYKEIFFDQSKNGYAGYIDGGASQEEFYKFIKPILEKMDGTEELLVKLNREDLLRKQRTFDNGSIPHQIHLGELHAILRRQEDFYPFLKDNREKIEKILTFRIPYYVGPLARGNSRFAWMTRKSEETITPWNFEEVVDKGASAQSFIERMTNFDKNLPNEKVLPKHSLLYEYFTVYNELTKVKYVTEGMRKPAFLSGEQKKAIVDLLFKTNRKVTVKQLKEDYFKKIECFDSVEISGVEDRFNASLGTYHDLLKIIKDKDFLDNEENEDILEDIVLTLTLFEDREMIEERLKTYAHLFDDKVMKQLKRRRYTGWGRLSRKLINGIRDKQSGKTILDFLKSDGFANRNFMQLIHDDSLTFKEDIQKAQVSGQGDSLHEHIANLAGSPAIKKGILQTVKVVDELVKVMGRHKPENIVIEMARENQTTQKGQKNSRERMKRIEEGIKELGSQILKEHPVENTQLQNEKLYLYYLQNGRDMYVDQELDINRLSDYDVDHIVPQSFLKDDSIDNKVLTRSDKNRGKSDNVPSEEVVKKMKNYWRQLLNAKLITQRKFDNLTKAERGGLSELDKAGFIKRQLVETRQITKHVAQILDSRMNTKYDENDKLIREVKVITLKSKLVSDFRKDFQFYKVREINNYHHAHDAYLNAVVGTALIKKYPKLESEFVYGDYKVYDVRKMIAKSEQEIGKATAKYFFYSNIMNFFKTEITLANGEIRKRPLIETNGETGEIVWDKGRDFATVRKVLSMPQVNIVKKTEVQTGGFSKESILPKRNSDKLIARKKDWDPKKYGGFVSPTVAYSVLVVAKVEKGKSKKLKSVKELLGITIMERSSFEKNPIDFLEAKGYKEVKKDLIIKLPKYSLFELENGRKRMLASARELQKGNELALPSKYVNFLYLASHYEKLKGSPEDNEQKQLFVEQHKHYLDEIIEQISEFSKRVILADANLDKVLSAYNKHRDKPIREQAENIIHLFTLTNLGAPAAFKYFDTTIDRKQYRSTKEVLDATLIHQSITGLYETRIDLSQLGGDEGADKRTADGSEFESPKKKRKV

SEQ ID NO: 342 - protein, 1588 aa, synthetic construct
  REGION 1..1588: note = 02. monoABE8.1_bpNLS + Y147R polypeptide sequence
MSEVEFSHEYWMRHALTLAKRARDEREVPVGAVLVLNNRVIGEGWNRAIGLHDPTAHAEIMALRQGGLVMQNYRLIDATLYVTFEPCVMCAGAMIHSRIGRVVFGVRNAKTGAAGSLMDVLHYPGMNHRVEITEGILADECAALLCRFFRMPRQVFNAQKKAQSSTDSGGSSGGSSGSETPGTSESATPESSGGSSGGSDKKYSIGLAIGTNSVGWAVITDEYKVPSKKFKVLGNTDRHSIKKNLIGALLFDSGETAEATRLKRTARRRYTRRKNRICYLQEIFSNEMAKVDDSFFHRLEESFLVEEDKKHERHPIFGNIVDEVAYHEKYPTIYHLRKKLVDSTDKADLRLIYLALAHMIKFRGHFLIEGDLNPDNSDVDKLFIQLVQTYNQLFEENPINASGVDAKAILSARLSKSRRLENLIAQLPGEKKNGLFGNLIALSLGLTPNFKSNFDLAEDAKLQLSKDTYDDDLDNLLAQIGDQYADLFLAAKNLSDAILLSDILRVNTEITKAPLSASMIKRYDEHHQDLTLLKALVRQQLPEKYKEIFFDQSKNGYAGYIDGGASQEEFYKFIKPILEKMDGTEELLVKLNREDLLRKQRTFDNGSIPHQIHLGELHAILRRQEDFYPFLKDNREKIEKILTFRIPYYVGPLARGNSRFAWMTRKSEETITPWNFEEVVDKGASAQSFIERMTNFDKNLPNEKVLPKHSLLYEYFTVYNELTKVKYVTEGMRKPAFLSGEQKKAIVDLLFKTNRKVTVKQLKEDYFKKIECFDSVEISGVEDRFNASLGTYHDLLKIIKDKDFLDNEENEDILEDIVLTLTLFEDREMIEERLKTYAHLFDDKVMKQLKRRRYTGWGRLSRKLINGIRDKQSGKTILDFLKSDGFANRNFMQLIHDDSLTFKEDIQKAQVSGQGDSLHEHIANLAGSPAIKKGILQTVKVVDELVKVMGRHKPENIVIEMARENQTTQKGQKNSRERMKRIEEGIKELGSQILKEHPVENTQLQNEKLYLYYLQNGRDMYVDQELDINRLSDYDVDHIVPQSFLKDDSIDNKVLTRSDKNRGKSDNVPSEEVVKKMKNYWRQLLNAKLITQRKFDNLTKAERGGLSELDKAGFIKRQLVETRQITKHVAQILDSRMNTKYDENDKLIREVKVITLKSKLVSDFRKDFQFYKVREINNYHHAHDAYLNAVVGTALIKKYPKLESEFVYGDYKVYDVRKMIAKSEQEIGKATAKYFFYSNIMNFFKTEITLANGEIRKRPLIETNGETGEIVWDKGRDFATVRKVLSMPQVNIVKKTEVQTGGFSKESILPKRNSDKLIARKKDWDPKKYGGFVSPTVAYSVLVVAKVEKGKSKKLKSVKELLGITIMERSSFEKNPIDFLEAKGYKEVKKDLIIKLPKYSLFELENGRKRMLASARELQKGNELALPSKYVNFLYLASHYEKLKGSPEDNEQKQLFVEQHKHYLDEIIEQISEFSKRVILADANLDKVLSAYNKHRDKPIREQAENIIHLFTLTNLGAPAAFKYFDTTIDRKQYRSTKEVLDATLIHQSITGLYETRIDLSQLGGDEGADKRTADGSEFESPKKKRKV

SEQ ID NO: 343 - protein, 1588 aa, synthetic construct
  REGION 1..1588: note = 03. monoABE8.1_bpNLS + Q154S polypeptide sequence
MSEVEFSHEYWMRHALTLAKRARDEREVPVGAVLVLNNRVIGEGWNRAIGLHDPTAHAEIMALRQGGLVMQNYRLIDATLYVTFEPCVMCAGAMIHSRIGRVVFGVRNAKTGAAGSLMDVLHYPGMNHRVEITEGILADECAALLCYFFRMPRSVFNAQKKAQSSTDSGGSSGGSSGSETPGTSESATPESSGGSSGGSDKKYSIGLAIGTNSVGWAVITDEYKVPSKKFKVLGNTDRHSIKKNLIGALLFDSGETAEATRLKRTARRRYTRRKNRICYLQEIFSNEMAKVDDSFFHRLEESFLVEEDKKHERHPIFGNIVDEVAYHEKYPTIYHLRKKLVDSTDKADLRLIYLALAHMIKFRGHFLIEGDLNPDNSDVDKLFIQLVQTYNQLFEENPINASGVDAKAILSARLSKSRRLENLIAQLPGEKKNGLFGNLIALSLGLTPNFKSNFDLAEDAKLQLSKDTYDDDLDNLLAQIGDQYADLFLAAKNLSDAILLSDILRVNTEITKAPLSASMIKRYDEHHQDLTLLKALVRQQLPEKYKEIFFDQSKNGYAGYIDGGASQEEFYKFIKPILEKMDGTEELLVKLNREDLLRKQRTFDNGSIPHQIHLGELHAILRRQEDFYPFLKDNREKIEKILTFRIPYYVGPLARGNSRFAWMTRKSEETITPWNFEEVVDKGASAQSFIERMTNFDKNLPNEKVLPKHSLLYEYFTVYNELTKVKYVTEGMRKPAFLSGEQKKAIVDLLFKTNRKVTVKQLKEDYFKKIECFDSVEISGVEDRFNASLGTYHDLLKIIKDKDFLDNEENEDILEDIVLTLTLFEDREMIEERLKTYAHLFDDKVMKQLKRRRYTGWGRLSRKLINGIRDKQSGKTILDFLKSDGFANRNFMQLIHDDSLTFKEDIQKAQVSGQGDSLHEHIANLAGSPAIKKGILQTVKVVDELVKVMGRHKPENIVIEMARENQTTQKGQKNSRERMKRIEEGIKELGSQILKEHPVENTQLQNEKLYLYYLQNGRDMYVDQELDINRLSDYDVDHIVPQSFLKDDSIDNKVLTRSDKNRGKSDNVPSEEVVKKMKNYWRQLLNAKLITQRKFDNLTKAERGGLSELDKAGFIKRQLVETRQITKHVAQILDSRMNTKYDENDKLIREVKVITLKSKLVSDFRKDFQFYKVREINNYHHAHDAYLNAVVGTALIKKYPKLESEFVYGDYKVYDVRKMIAKSEQEIGKATAKYFFYSNIMNFFKTEITLANGEIRKRPLIETNGETGEIVWDKGRDFATVRKVLSMPQVNIVKKTEVQTGGFSKESILPKRNSDKLIARKKDWDPKKYGGFVSPTVAYSVLVVAKVEKGKSKKLKSVKELLGITIMERSSFEKNPIDFLEAKGYKEVKKDLIIKLPKYSLFELENGRKRMLASARELQKGNELALPSKYVNFLYLASHYEKLKGSPEDNEQKQLFVEQHKHYLDEIIEQISEFSKRVILADANLDKVLSAYNKHRDKPIREQAENIIHLFTLTNLGAPAAFKYFDTTIDRKQYRSTKEVLDATLIHQSITGLYETRIDLSQLGGDEGADKRTADGSEFESPKKKRKV

SEQ ID NO: 344 - protein, 1588 aa, synthetic construct
  REGION 1..1588: note = 04. monoABE8.1_bpNLS + Y123H polypeptide sequence
MSEVEFSHEYWMRHALTLAKRARDEREVPVGAVLVLNNRVIGEGWNRAIGLHDPTAHAEIMALRQGGLVMQNYRLIDATLYVTFEPCVMCAGAMIHSRIGRVVFGVRNAKTGAAGSLMDVLHHPGMNHRVEITEGILADECAALLCYFFRMPRQVFNAQKKAQSSTDSGGSSGGSSGSETPGTSESATPESSGGSSGGSDKKYSIGLAIGTNSVGWAVITDEYKVPSKKFKVLGNTDRHSIKKNLIGALLFDSGETAEATRLKRTARRRYTRRKNRICYLQEIFSNEMAKVDDSFFHRLEESFLVEEDKKHERHPIFGNIVDEVAYHEKYPTIYHLRKKLVDSTDKADLRLIYLALAHMIKFRGHFLIEGDLNPDNSDVDKLFIQLVQTYNQLFEENPINASGVDAKAILSARLSKSRRLENLIAQLPGEKKNGLFGNLIALSLGLTPNFKSNFDLAEDAKLQLSKDTYDDDLDNLLAQIGDQYADLFLAAKNLSDAILLSDILRVNTEITKAPLSASMIKRYDEHHQDLTLLKALVRQQLPEKYKEIFFDQSKNGYAGYIDGGASQEEFYKFIKPILEKMDGTEELLVKLNREDLLRKQRTFDNGSIPHQIHLGELHAILRRQEDFYPFLKDNREKIEKILTFRIPYYVGPLARGNSRFAWMTRKSEETITPWNFEEVVDKGASAQSFIERMTNFDKNLPNEKVLPKHSLLYEYFTVYNELTKVKYVTEGMRKPAFLSGEQKKAIVDLLFKTNRKVTVKQLKEDYFKKIECFDSVEISGVEDRFNASLGTYHDLLKIIKDKDFLDNEENEDILEDIVLTLTLFEDREMIEERLKTYAHLFDDKVMKQLKRRRYTGWGRLSRKLINGIRDKQSGKTILDFLKSDGFANRNFMQLIHDDSLTFKEDIQKAQVSGQGDSLHEHIANLAGSPAIKKGILQTVKVVDELVKVMGRHKPENIVIEMARENQTTQKGQKNSRERMKRIEEGIKELGSQILKEHPVENTQLQNEKLYLYYLQNGRDMYVDQELDINRLSDYDVDHIVPQSFLKDDSIDNKVLTRSDKNRGKSDNVPSEEVVKKMKNYWRQLLNAKLITQRKFDNLTKAERGGLSELDKAGFIKRQLVETRQITKHVAQILDSRMNTKYDENDKLIREVKVITLKSKLVSDFRKDFQFYKVREINNYHHAHDAYLNAVVGTALIKKYPKLESEFVYGDYKVYDVRKMIAKSEQEIGKATAKYFFYSNIMNFFKTEITLANGEIRKRPLIETNGETGEIVWDKGRDFATVRKVLSMPQVNIVKKTEVQTGGFSKESILPKRNSDKLIARKKDWDPKKYGGFVSPTVAYSVLVVAKVEKGKSKKLKSVKELLGITIMERSSFEKNPIDFLEAKGYKEVKKDLIIKLPKYSLFELENGRKRMLASARELQKGNELALPSKYVNFLYLASHYEKLKGSPEDNEQKQLFVEQHKHYLDEIIEQISEFSKRVILADANLDKVLSAYNKHRDKPIREQAENIIHLFTLTNLGAPAAFKYFDTTIDRKQYRSTKEVLDATLIHQSITGLYETRIDLSQLGGDEGADKRTADGSEFESPKKKRKV

SEQ ID NO: 345 - protein, 1588 aa, synthetic construct
  REGION 1..1588: note = 05. monoABE8.1_bpNLS + V82S polypeptide sequence
MSEVEFSHEYWMRHALTLAKRARDEREVPVGAVLVLNNRVIGEGWNRAIGLHDPTAHAEIMALRQGGLVMQNYRLIDATLYSTFEPCVMCAGAMIHSRIGRVVFGVRNAKTGAAGSLMDVLHYPGMNHRVEITEGILADECAALLCYFFRMPRQVFNAQKKAQSSTDSGGSSGGSSGSETPGTSESATPESSGGSSGGSDKKYSIGLAIGTNSVGWAVITDEYKVPSKKFKVLGNTDRHSIKKNLIGALLFDSGETAEATRLKRTARRRYTRRKNRICYLQEIFSNEMAKVDDSFFHRLEESFLVEEDKKHERHPIFGNIVDEVAYHEKYPTIYHLRKKLVDSTDKADLRLIYLALAHMIKFRGHFLIEGDLNPDNSDVDKLFIQLVQTYNQLFEENPINASGVDAKAILSARLSKSRRLENLIAQLPGEKKNGLFGNLIALSLGLTPNFKSNFDLAEDAKLQLSKDTYDDDLDNLLAQIGDQYADLFLAAKNLSDAILLSDILRVNTEITKAPLSASMIKRYDEHHQDLTLLKALVRQQLPEKYKEIFFDQSKNGYAGYIDGGASQEEFYKFIKPILEKMDGTEELLVKLNREDLLRKQRTFDNGSIPHQIHLGELHAILRRQEDFYPFLKDNREKIEKILTFRIPYYVGPLARGNSRFAWMTRKSEETITPWNFEEVVDKGASAQSFIERMTNFDKNLPNEKVLPKHSLLYEYFTVYNELTKVKYVTEGMRKPAFLSGEQKKAIVDLLFKTNRKVTVKQLKEDYFKKIECFDSVEISGVEDRFNASLGTYHDLLKIIKDKDFLDNEENEDILEDIVLTLTLFEDREMIEERLKTYAHLFDDKVMKQLKRRRYTGWGRLSRKLINGIRDKQSGKTILDFLKSDGFANRNFMQLIHDDSLTFKEDIQKAQVSGQGDSLHEHIANLAGSPAIKKGILQTVKVVDELVKVMGRHKPENIVIEMARENQTTQKGQKNSRERMKRIEEGIKELGSQILKEHPVENTQLQNEKLYLYYLQNGRDMYVDQELDINRLSDYDVDHIVPQSFLKDDSIDNKVLTRSDKNRGKSDNVPSEEVVKKMKNYWRQLLNAKLITQRKFDNLTKAERGGLSELDKAGFIKRQLVETRQITKHVAQILDSRMNTKYDENDKLIREVKVITLKSKLVSDFRKDFQFYKVREINNYHHAHDAYLNAVVGTALIKKYPKLESEFVYGDYKVYDVRKMIAKSEQEIGKATAKYFFYSNIMNFFKTEITLANGEIRKRPLIETNGETGEIVWDKGRDFATVRKVLSMPQVNIVKKTEVQTGGFSKESILPKRNSDKLIARKKDWDPKKYGGFVSPTVAYSVLVVAKVEKGKSKKLKSVKELLGITIMERSSFEKNPIDFLEAKGYKEVKKDLIIKLPKYSLFELENGRKRMLASARELQKGNELALPSKYVNFLYLASHYEKLKGSPEDNEQKQLFVEQHKHYLDEIIEQISEFSKRVILADANLDKVLSAYNKHRDKPIREQAENIIHLFTLTNLGAPAAFKYFDTTIDRKQYRSTKEVLDATLIHQSITGLYETRIDLSQLGGDEGADKRTADGSEFESPKKKRKV

SEQ ID NO: 346 - protein, 1588 aa, synthetic construct
  REGION 1..1588: note = 06. monoABE8.1_bpNLS + T166R polypeptide sequence
MSEVEFSHEYWMRHALTLAKRARDEREVPVGAVLVLNNRVIGEGWNRAIGLHDPTAHAEIMALRQGGLVMQNYRLIDATLYVTFEPCVMCAGAMIHSRIGRVVFGVRNAKTGAAGSLMDVLHYPGMNHRVEITEGILADECAALLCYFFRMPRQVFNAQKKAQSSRDSGGSSGGSSGSETPGTSESATPESSGGSSGGSDKKYSIGLAIGTNSVGWAVITDEYKVPSKKFKVLGNTDRHSIKKNLIGALLFDSGETAEATRLKRTARRRYTRRKNRICYLQEIFSNEMAKVDDSFFHRLEESFLVEEDKKHERHPIFGNIVDEVAYHEKYPTIYHLRKKLVDSTDKADLRLIYLALAHMIKFRGHFLIEGDLNPDNSDVDKLFIQLVQTYNQLFEENPINASGVDAKAILSARLSKSRRLENLIAQLPGEKKNGLFGNLIALSLGLTPNFKSNFDLAEDAKLQLSKDTYDDDLDNLLAQIGDQYADLFLAAKNLSDAILLSDILRVNTEITKAPLSASMIKRYDEHHQDLTLLKALVRQQLPEKYKEIFFDQSKNGYAGYIDGGASQEEFYKFIKPILEKMDGTEELLVKLNREDLLRKQRTFDNGSIPHQIHLGELHAILRRQEDFYPFLKDNREKIEKILTFRIPYYVGPLARGNSRFAWMTRKSEETITPWNFEEVVDKGASAQSFIERMTNFDKNLPNEKVLPKHSLLYEYFTVYNELTKVKYVTEGMRKPAFLSGEQKKAIVDLLFKTNRKVTVKQLKEDYFKKIECFDSVEISGVEDRFNASLGTYHDLLKIIKDKDFLDNEENEDILEDIVLTLTLFEDREMIEERLKTYAHLFDDKVMKQLKRRRYTGWGRLSRKLINGIRDKQSGKTILDFLKSDGFANRNFMQLIHDDSLTFKEDIQKAQVSGQGDSLHEHIANLAGSPAIKKGILQTVKVVDELVKVMGRHKPENIVIEMARENQTTQKGQKNSRERMKRIEEGIKELGSQILKEHPVENTQLQNEKLYLYYLQNGRDMYVDQELDINRLSDYDVDHIVPQSFLKDDSIDNKVLTRSDKNRGKSDNVPSEEVVKKMKNYWRQLLNAKLITQRKFDNLTKAERGGLSELDKAGFIKRQLVETRQITKHVAQILDSRMNTKYDENDKLIREVKVITLKSKLVSDFRKDFQFYKVREINNYHHAHDAYLNAVVGTALIKKYPKLESEFVYGDYKVYDVRKMIAKSEQEIGKATAKYFFYSNIMNFFKTEITLANGEIRKRPLIETNGETGEIVWDKGRDFATVRKVLSMPQVNIVKKTEVQTGGFSKESILPKRNSDKLIARKKDWDPKKYGGFVSPTVAYSVLVVAKVEKGKSKKLKSVKELLGITIMERSSFEKNPIDFLEAKGYKEVKKDLIIKLPKYSLFELENGRKRMLASARELQKGNELALPSKYVNFLYLASHYEKLKGSPEDNEQKQLFVEQHKHYLDEIIEQISEFSKRVILADANLDKVLSAYNKHRDKPIREQAENIIHLFTLTNLGAPAAFKYFDTTIDRKQYRSTKEVLDATLIHQSITGLYETRIDLSQLGGDEGADKRTADGSEFESPKKKRKV

SEQ ID NO: 347 - protein, 1588 aa, synthetic construct
  REGION 1..1588: note = 07. monoABE8.1_bpNLS + Q154R polypeptide sequence
MSEVEFSHEYWMRHALTLAKRARDEREVPVGAVLVLNNRVIGEGWNRAIGLHDPTAHAEIMALRQGGLVMQNYRLIDATLYVTFEPCVMCAGAMIHSRIGRVVFGVRNAKTGAAGSLMDVLHYPGMNHRVEITEGILADECAALLCYFFRMPRRVFNAQKKAQSSTDSGGSSGGSSGSETPGTSESATPESSGGSSGGSDKKYSIGLAIGTNSVGWAVITDEYKVPSKKFKVLGNTDRHSIKKNLIGALLFDSGETAEATRLKRTARRRYTRRKNRICYLQEIFSNEMAKVDDSFFHRLEESFLVEEDKKHERHPIFGNIVDEVAYHEKYPTIYHLRKKLVDSTDKADLRLIYLALAHMIKFRGHFLIEGDLNPDNSDVDKLFIQLVQTYNQLFEENPINASGVDAKAILSARLSKSRRLENLIAQLPGEKKNGLFGNLIALSLGLTPNFKSNFDLAEDAKLQLSKDTYDDDLDNLLAQIGDQYADLFLAAKNLSDAILLSDILRVNTEITKAPLSASMIKRYDEHHQDLTLLKALVRQQLPEKYKEIFFDQSKNGYAGYIDGGASQEEFYKFIKPILEKMDGTEELLVKLNREDLLRKQRTFDNGSIPHQIHLGELHAILRRQEDFYPFLKDNREKIEKILTFRIPYYVGPLARGNSRFAWMTRKSEETITPWNFEEVVDKGASAQSFIERMTNFDKNLPNEKVLPKHSLLYEYFTVYNELTKVKYVTEGMRKPAFLSGEQKKAIVDLLFKTNRKVTVKQLKEDYFKKIECFDSVEISGVEDRFNASLGTYHDLLKIIKDKDFLDNEENEDILEDIVLTLTLFEDREMIEERLKTYAHLFDDKVMKQLKRRRYTGWGRLSRKLINGIRDKQSGKTILDFLKSDGFANRNFMQLIHDDSLTFKEDIQKAQVSGQGDSLHEHIANLAGSPAIKKGILQTVKVVDELVKVMGRHKPENIVIEMARENQTTQKGQKNSRERMKRIEEGIKELGSQILKEHPVENTQLQNEKLYLYYLQNGRDMYVDQELDINRLSDYDVDHIVPQSFLKDDSIDNKVLTRSDKNRGKSDNVPSEEVVKKMKNYWRQLLNAKLITQRKFDNLTKAERGGLSELDKAGFIKRQLVETRQITKHVAQILDSRMNTKYDENDKLIREVKVITLKSKLVSDFRKDFQFYKVREINNYHHAHDAYLNAVVGTALIKKYPKLESEFVYGDYKVYDVRKMIAKSEQEIGKATAKYFFYSNIMNFFKTEITLANGEIRKRPLIETNGETGEIVWDKGRDFATVRKVLSMPQVNIVKKTEVQTGGFSKESILPKRNSDKLIARKKDWDPKKYGGFVSPTVAYSVLVVAKVEKGKSKKLKSVKELLGITIMERSSFEKNPIDFLEAKGYKEVKKDLIIKLPKYSLFELENGRKRMLASARELQKGNELALPSKYVNFLYLASHYEKLKGSPEDNEQKQLFVEQHKHYLDEIIEQISEFSKRVILADANLDKVLSAYNKHRDKPIREQAENIIHLFTLTNLGAPAAFKYFDTTIDRKQYRSTKEVLDATLIHQSITGLYETRIDLSQLGGDEGADKRTADGSEFESPKKKRKV

SEQ ID NO: 348 - protein, 1588 aa, synthetic construct
  REGION 1..1588: note = 08. monoABE8.1_bpNLS +Y147R_Q154R_Y123H polypeptide sequence
MSEVEFSHEYWMRHALTLAKRARDEREVPVGAVLVLNNRVIGEGWNRAIGLHDPTAHAEIMALRQGGLVMQNYRLIDATLYVTFEPCVMCAGAMIHSRIGRVVFGVRNAKTGAAGSLMDVLHHPGMNHRVEITEGILADECAALLCRFFRMPRRVFNAQKKAQSSTDSGGSSGGSSGSETPGTSESATPESSGGSSGGSDKKYSIGLAIGTNSVGWAVITDEYKVPSKKFKVLGNTDRHSIKKNLIGALLFDSGETAEATRLKRTARRRYTRRKNRICYLQEIFSNEMAKVDDSFFHRLEESFLVEEDKKHERHPIFGNIVDEVAYHEKYPTIYHLRKKLVDSTDKADLRLIYLALAHMIKFRGHFLIEGDLNPDNSDVDKLFIQLVQTYNQLFEENPINASGVDAKAILSARLSKSRRLENLIAQLPGEKKNGLFGNLIALSLGLTPNFKSNFDLAEDAKLQLSKDTYDDDLDNLLAQIGDQYADLFLAAKNLSDAILLSDILRVNTEITKAPLSASMIKRYDEHHQDLTLLKALVRQQLPEKYKEIFFDQSKNGYAGYIDGGASQEEFYKFIKPILEKMDGTEELLVKLNREDLLRKQRTFDNGSIPHQIHLGELHAILRRQEDFYPFLKDNREKIEKILTFRIPYYVGPLARGNSRFAWMTRKSEETITPWNFEEVVDKGASAQSFIERMTNFDKNLPNEKVLPKHSLLYEYFTVYNELTKVKYVTEGMRKPAFLSGEQKKAIVDLLFKTNRKVTVKQLKEDYFKKIECFDSVEISGVEDRFNASLGTYHDLLKIIKDKDFLDNEENEDILEDIVLTLTLFEDREMIEERLKTYAHLFDDKVMKQLKRRRYTGWGRLSRKLINGIRDKQSGKTILDFLKSDGFANRNFMQLIHDDSLTFKEDIQKAQVSGQGDSLHEHIANLAGSPAIKKGILQTVKVVDELVKVMGRHKPENIVIEMARENQTTQKGQKNSRERMKRIEEGIKELGSQILKEHPVENTQLQNEKLYLYYLQNGRDMYVDQELDINRLSDYDVDHIVPQSFLKDDSIDNKVLTRSDKNRGKSDNVPSEEVVKKMKNYWRQLLNAKLITQRKFDNLTKAERGGLSELDKAGFIKRQLVETRQITKHVAQILDSRMNTKYDENDKLIREVKVITLKSKLVSDFRKDFQFYKVREINNYHHAHDAYLNAVVGTALIKKYPKLESEFVYGDYKVYDVRKMIAKSEQEIGKATAKYFFYSNIMNFFKTEITLANGEIRKRPLIETNGETGEIVWDKGRDFATVRKVLSMPQVNIVKKTEVQTGGFSKESILPKRNSDKLIARKKDWDPKKYGGFVSPTVAYSVLVVAKVEKGKSKKLKSVKELLGITIMERSSFEKNPIDFLEAKGYKEVKKDLIIKLPKYSLFELENGRKRMLASARELQKGNELALPSKYVNFLYLASHYEKLKGSPEDNEQKQLFVEQHKHYLDEIIEQISEFSKRVILADANLDKVLSAYNKHRDKPIREQAENIIHLFTLTNLGAPAAFKYFDTTIDRKQYRSTKEVLDATLIHQSITGLYETRIDLSQLGGDEGADKRTADGSEFESPKKKRKV

SEQ ID NO: 349 - protein, 1588 aa, synthetic construct
  REGION 1..1588: note = 09. monoABE8.1_bpNLS +Y147R_Q154R_I76Y polypeptide sequence
MSEVEFSHEYWMRHALTLAKRARDEREVPVGAVLVLNNRVIGEGWNRAIGLHDPTAHAEIMALRQGGLVMQNYRLYDATLYVTFEPCVMCAGAMIHSRIGRVVFGVRNAKTGAAGSLMDVLHYPGMNHRVEITEGILADECAALLCRFFRMPRRVFNAQKKAQSSTDSGGSSGGSSGSETPGTSESATPESSGGSSGGSDKKYSIGLAIGTNSVGWAVITDEYKVPSKKFKVLGNTDRHSIKKNLIGALLFDSGETAEATRLKRTARRRYTRRKNRICYLQEIFSNEMAKVDDSFFHRLEESFLVEEDKKHERHPIFGNIVDEVAYHEKYPTIYHLRKKLVDSTDKADLRLIYLALAHMIKFRGHFLIEGDLNPDNSDVDKLFIQLVQTYNQLFEENPINASGVDAKAILSARLSKSRRLENLIAQLPGEKKNGLFGNLIALSLGLTPNFKSNFDLAEDAKLQLSKDTYDDDLDNLLAQIGDQYADLFLAAKNLSDAILLSDILRVNTEITKAPLSASMIKRYDEHHQDLTLLKALVRQQLPEKYKEIFFDQSKNGYAGYIDGGASQEEFYKFIKPILEKMDGTEELLVKLNREDLLRKQRTFDNGSIPHQIHLGELHAILRRQEDFYPFLKDNREKIEKILTFRIPYYVGPLARGNSRFAWMTRKSEETITPWNFEEVVDKGASAQSFIERMTNFDKNLPNEKVLPKHSLLYEYFTVYNELTKVKYVTEGMRKPAFLSGEQKKAIVDLLFKTNRKVTVKQLKEDYFKKIECFDSVEISGVEDRFNASLGTYHDLLKIIKDKDFLDNEENEDILEDIVLTLTLFEDREMIEERLKTYAHLFDDKVMKQLKRRRYTGWGRLSRKLINGIRDKQSGKTILDFLKSDGFANRNFMQLIHDDSLTFKEDIQKAQVSGQGDSLHEHIANLAGSPAIKKGILQTVKVVDELVKVMGRHKPENIVIEMARENQTTQKGQKNSRERMKRIEEGIKELGSQILKEHPVENTQLQNEKLYLYYLQNGRDMYVDQELDINRLSDYDVDHIVPQSFLKDDSIDNKVLTRSDKNRGKSDNVPSEEVVKKMKNYWRQLLNAKLITQRKFDNLTKAERGGLSELDKAGFIKRQLVETRQITKHVAQILDSRMNTKYDENDKLIREVKVITLKSKLVSDFRKDFQFYKVREINNYHHAHDAYLNAVVGTALIKKYPKLESEFVYGDYKVYDVRKMIAKSEQEIGKATAKYFFYSNIMNFFKTEITLANGEIRKRPLIETNGETGEIVWDKGRDFATVRKVLSMPQVNIVKKTEVQTGGFSKESILPKRNSDKLIARKKDWDPKKYGGFVSPTVAYSVLVVAKVEKGKSKKLKSVKELLGITIMERSSFEKNPIDFLEAKGYKEVKKDLIIKLPKYSLFELENGRKRMLASARELQKGNELALPSKYVNFLYLASHYEKLKGSPEDNEQKQLFVEQHKHYLDEIIEQISEFSKRVILADANLDKVLSAYNKHRDKPIREQAENIIHLFTLTNLGAPAAFKYFDTTIDRKQYRSTKEVLDATLIHQSITGLYETRIDLSQLGGDEGADKRTADGSEFESPKKKRKV

SEQ ID NO: 350 - protein, 1588 aa, synthetic construct
  REGION 1..1588: note = 10. monoABE8.1_bpNLS +Y147R_Q154R_T166R polypeptide sequence
MSEVEFSHEYWMRHALTLAKRARDEREVPVGAVLVLNNRVIGEGWNRAIGLHDPTAHAEIMALRQGGLVMQNYRLIDATLYVTFEPCVMCAGAMIHSRIGRVVFGVRNAKTGAAGSLMDVLHYPGMNHRVEITEGILADECAALLCRFFRMPRRVFNAQKKAQSSRDSGGSSGGSSGSETPGTSESATPESSGGSSGGSDKKYSIGLAIGTNSVGWAVITDEYKVPSKKFKVLGNTDRHSIKKNLIGALLFDSGETAEATRLKRTARRRYTRRKNRICYLQEIFSNEMAKVDDSFFHRLEESFLVEEDKKHERHPIFGNIVDEVAYHEKYPTIYHLRKKLVDSTDKADLRLIYLALAHMIKFRGHFLIEGDLNPDNSDVDKLFIQLVQTYNQLFEENPINASGVDAKAILSARLSKSRRLENLIAQLPGEKKNGLFGNLIALSLGLTPNFKSNFDLAEDAKLQLSKDTYDDDLDNLLAQIGDQYADLFLAAKNLSDAILLSDILRVNTEITKAPLSASMIKRYDEHHQDLTLLKALVRQQLPEKYKEIFFDQSKNGYAGYIDGGASQEEFYKFIKPILEKMDGTEELLVKLNREDLLRKQRTFDNGSIPHQIHLGELHAILRRQEDFYPFLKDNREKIEKILTFRIPYYVGPLARGNSRFAWMTRKSEETITPWNFEEVVDKGASAQSFIERMTNFDKNLPNEKVLPKHSLLYEYFTVYNELTKVKYVTEGMRKPAFLSGEQKKAIVDLLFKTNRKVTVKQLKEDYFKKIECFDSVEISGVEDRFNASLGTYHDLLKIIKDKDFLDNEENEDILEDIVLTLTLFEDREMIEERLKTYAHLFDDKVMKQLKRRRYTGWGRLSRKLINGIRDKQSGKTILDFLKSDGFANRNFMQLIHDDSLTFKEDIQKAQVSGQGDSLHEHIANLAGSPAIKKGILQTVKVVDELVKVMGRHKPENIVIEMARENQTTQKGQKNSRERMKRIEEGIKELGSQILKEHPVENTQLQNEKLYLYYLQNGRDMYVDQELDINRLSDYDVDHIVPQSFLKDDSIDNKVLTRSDKNRGKSDNVPSEEVVKKMKNYWRQLLNAKLITQRKFDNLTKAERGGLSELDKAGFIKRQLVETRQITKHVAQILDSRMNTKYDENDKLIREVKVITLKSKLVSDFRKDFQFYKVREINNYHHAHDAYLNAVVGTALIKKYPKLESEFVYGDYKVYDVRKMIAKSEQEIGKATAKYFFYSNIMNFFKTEITLANGEIRKRPLIETNGETGEIVWDKGRDFATVRKVLSMPQVNIVKKTEVQTGGFSKESILPKRNSDKLIARKKDWDPKKYGGFVSPTVAYSVLVVAKVEKGKSKKLKSVKELLGITIMERSSFEKNPIDFLEAKGYKEVKKDLIIKLPKYSLFELENGRKRMLASARELQKGNELALPSKYVNFLYLASHYEKLKGSPEDNEQKQLFVEQHKHYLDEIIEQISEFSKRVILADANLDKVLSAYNKHRDKPIREQAENIIHLFTLTNLGAPAAFKYFDTTIDRKQYRSTKEVLDATLIHQSITGLYETRIDLSQLGGDEGADKRTADGSEFESPKKKRKV

SEQ ID NO: 351 - protein, 1588 aa, synthetic construct
  REGION 1..1588: note = 11. monoABE8.1_bpNLS +Y147T_Q154R polypeptide sequence
MSEVEFSHEYWMRHALTLAKRARDEREVPVGAVLVLNNRVIGEGWNRAIGLHDPTAHAEIMALRQGGLVMQNYRLIDATLYVTFEPCVMCAGAMIHSRIGRVVFGVRNAKTGAAGSLMDVLHYPGMNHRVEITEGILADECAALLCTFFRMPRRVFNAQKKAQSSTDSGGSSGGSSGSETPGTSESATPESSGGSSGGSDKKYSIGLAIGTNSVGWAVITDEYKVPSKKFKVLGNTDRHSIKKNLIGALLFDSGETAEATRLKRTARRRYTRRKNRICYLQEIFSNEMAKVDDSFFHRLEESFLVEEDKKHERHPIFGNIVDEVAYHEKYPTIYHLRKKLVDSTDKADLRLIYLALAHMIKFRGHFLIEGDLNPDNSDVDKLFIQLVQTYNQLFEENPINASGVDAKAILSARLSKSRRLENLIAQLPGEKKNGLFGNLIALSLGLTPNFKSNFDLAEDAKLQLSKDTYDDDLDNLLAQIGDQYADLFLAAKNLSDAILLSDILRVNTEITKAPLSASMIKRYDEHHQDLTLLKALVRQQLPEKYKEIFFDQSKNGYAGYIDGGASQEEFYKFIKPILEKMDGTEELLVKLNREDLLRKQRTFDNGSIPHQIHLGELHAILRRQEDFYPFLKDNREKIEKILTFRIPYYVGPLARGNSRFAWMTRKSEETITPWNFEEVVDKGASAQSFIERMTNFDKNLPNEKVLPKHSLLYEYFTVYNELTKVKYVTEGMRKPAFLSGEQKKAIVDLLFKTNRKVTVKQLKEDYFKKIECFDSVEISGVEDRFNASLGTYHDLLKIIKDKDFLDNEENEDILEDIVLTLTLFEDREMIEERLKTYAHLFDDKVMKQLKRRRYTGWGRLSRKLINGIRDKQSGKTILDFLKSDGFANRNFMQLIHDDSLTFKEDIQKAQVSGQGDSLHEHIANLAGSPAIKKGILQTVKVVDELVKVMGRHKPENIVIEMARENQTTQKGQKNSRERMKRIEEGIKELGSQILKEHPVENTQLQNEKLYLYYLQNGRDMYVDQELDINRLSDYDVDHIVPQSFLKDDSIDNKVLTRSDKNRGKSDNVPSEEVVKKMKNYWRQLLNAKLITQRKFDNLTKAERGGLSELDKAGFIKRQLVETRQITKHVAQILDSRMNTKYDENDKLIREVKVITLKSKLVSDFRKDFQFYKVREINNYHHAHDAYLNAVVGTALIKKYPKLESEFVYGDYKVYDVRKMIAKSEQEIGKATAKYFFYSNIMNFFKTEITLANGEIRKRPLIETNGETGEIVWDKGRDFATVRKVLSMPQVNIVKKTEVQTGGFSKESILPKRNSDKLIARKKDWDPKKYGGFVSPTVAYSVLVVAKVEKGKSKKLKSVKELLGITIMERSSFEKNPIDFLEAKGYKEVKKDLIIKLPKYSLFELENGRKRMLASARELQKGNELALPSKYVNFLYLASHYEKLKGSPEDNEQKQLFVEQHKHYLDEIIEQISEFSKRVILADANLDKVLSAYNKHRDKPIREQAENIIHLFTLTNLGAPAAFKYFDTTIDRKQYRSTKEVLDATLIHQSITGLYETRIDLSQLGGDEGADKRTADGSEFESPKKKRKV

SEQ ID NO: 352 - protein, 1588 aa, synthetic construct
  REGION 1..1588: note = 12. monoABE8.1_bpNLS +Y147T_Q154S polypeptide sequence
MSEVEFSHEYWMRHALTLAKRARDEREVPVGAVLVLNNRVIGEGWNRAIGLHDPTAHAEIMALRQGGLVMQNYRLIDATLYVTFEPCVMCAGAMIHSRIGRVVFGVRNAKTGAAGSLMDVLHYPGMNHRVEITEGILADECAALLCTFFRMPRSVFNAQKKAQSSTDSGGSSGGSSGSETPGTSESATPESSGGSSGGSDKKYSIGLAIGTNSVGWAVITDEYKVPSKKFKVLGNTDRHSIKKNLIGALLFDSGETAEATRLKRTARRRYTRRKNRICYLQEIFSNEMAKVDDSFFHRLEESFLVEEDKKHERHPIFGNIVDEVAYHEKYPTIYHLRKKLVDSTDKADLRLIYLALAHMIKFRGHFLIEGDLNPDNSDVDKLFIQLVQTYNQLFEENPINASGVDAKAILSARLSKSRRLENLIAQLPGEKKNGLFGNLIALSLGLTPNFKSNFDLAEDAKLQLSKDTYDDDLDNLLAQIGDQYADLFLAAKNLSDAILLSDILRVNTEITKAPLSASMIKRYDEHHQDLTLLKALVRQQLPEKYKEIFFDQSKNGYAGYIDGGASQEEFYKFIKPILEKMDGTEELLVKLNREDLLRKQRTFDNGSIPHQIHLGELHAILRRQEDFYPFLKDNREKIEKILTFRIPYYVGPLARGNSRFAWMTRKSEETITPWNFEEVVDKGASAQSFIERMTNFDKNLPNEKVLPKHSLLYEYFTVYNELTKVKYVTEGMRKPAFLSGEQKKAIVDLLFKTNRKVTVKQLKEDYFKKIECFDSVEISGVEDRFNASLGTYHDLLKIIKDKDFLDNEENEDILEDIVLTLTLFEDREMIEERLKTYAHLFDDKVMKQLKRRRYTGWGRLSRKLINGIRDKQSGKTILDFLKSDGFANRNFMQLIHDDSLTFKEDIQKAQVSGQGDSLHEHIANLAGSPAIKKGILQTVKVVDELVKVMGRHKPENIVIEMARENQTTQKGQKNSRERMKRIEEGIKELGSQILKEHPVENTQLQNEKLYLYYLQNGRDMYVDQELDINRLSDYDVDHIVPQSFLKDDSIDNKVLTRSDKNRGKSDNVPSEEVVKKMKNYWRQLLNAKLITQRKFDNLTKAERGGLSELDKAGFIKRQLVETRQITKHVAQILDSRMNTKYDENDKLIREVKVITLKSKLVSDFRKDFQFYKVREINNYHHAHDAYLNAVVGTALIKKYPKLESEFVYGDYKVYDVRKMIAKSEQEIGKATAKYFFYSNIMNFFKTEITLANGEIRKRPLIETNGETGEIVWDKGRDFATVRKVLSMPQVNIVKKTEVQTGGFSKESILPKRNSDKLIARKKDWDPKKYGGFVSPTVAYSVLVVAKVEKGKSKKLKSVKELLGITIMERSSFEKNPIDFLEAKGYKEVKKDLIIKLPKYSLFELENGRKRMLASARELQKGNELALPSKYVNFLYLASHYEKLKGSPEDNEQKQLFVEQHKHYLDEIIEQISEFSKRVILADANLDKVLSAYNKHRDKPIREQAENIIHLFTLTNLGAPAAFKYFDTTIDRKQYRSTKEVLDATLIHQSITGLYETRIDLSQLGGDEGADKRTADGSEFESPKKKRKV

SEQ ID NO: 353 - protein, 1588 aa, synthetic construct
  REGION 1..1588: note = 13. monoABE8.1_bpNLS +H123Y123H_Y147R_Q154R_I76Y polypeptide sequence
MSEVEFSHEYWMRHALTLAKRARDEREVPVGAVLVLNNRVIGEGWNRAIGLHDPTAHAEIMALRQGGLVMQNYRLYDATLYVTFEPCVMCAGAMIHSRIGRVVFGVRNAKTGAAGSLMDVLHHPGMNHRVEITEGILADECAALLCRFFRMPRRVFNAQKKAQSSTDSGGSSGGSSGSETPGTSESATPESSGGSSGGSDKKYSIGLAIGTNSVGWAVITDEYKVPSKKFKVLGNTDRHSIKKNLIGALLFDSGETAEATRLKRTARRRYTRRKNRICYLQEIFSNEMAKVDDSFFHRLEESFLVEEDKKHERHPIFGNIVDEVAYHEKYPTIYHLRKKLVDSTDKADLRLIYLALAHMIKFRGHFLIEGDLNPDNSDVDKLFIQLVQTYNQLFEENPINASGVDAKAILSARLSKSRRLENLIAQLPGEKKNGLFGNLIALSLGLTPNFKSNFDLAEDAKLQLSKDTYDDDLDNLLAQIGDQYADLFLAAKNLSDAILLSDILRVNTEITKAPLSASMIKRYDEHHQDLTLLKALVRQQLPEKYKEIFFDQSKNGYAGYIDGGASQEEFYKFIKPILEKMDGTEELLVKLNREDLLRKQRTFDNGSIPHQIHLGELHAILRRQEDFYPFLKDNREKIEKILTFRIPYYVGPLARGNSRFAWMTRKSEETITPWNFEEVVDKGASAQSFIERMTNFDKNLPNEKVLPKHSLLYEYFTVYNELTKVKYVTEGMRKPAFLSGEQKKAIVDLLFKTNRKVTVKQLKEDYFKKIECFDSVEISGVEDRFNASLGTYHDLLKIIKDKDFLDNEENEDILEDIVLTLTLFEDREMIEERLKTYAHLFDDKVMKQLKRRRYTGWGRLSRKLINGIRDKQSGKTILDFLKSDGFANRNFMQLIHDDSLTFKEDIQKAQVSGQGDSLHEHIANLAGSPAIKKGILQTVKVVDELVKVMGRHKPENIVIEMARENQTTQKGQKNSRERMKRIEEGIKELGSQILKEHPVENTQLQNEKLYLYYLQNGRDMYVDQELDINRLSDYDVDHIVPQSFLKDDSIDNKVLTRSDKNRGKSDNVPSEEVVKKMKNYWRQLLNAKLITQRKFDNLTKAERGGLSELDKAGFIKRQLVETRQITKHVAQILDSRMNTKYDENDKLIREVKVITLKSKLVSDFRKDFQFYKVREINNYHHAHDAYLNAVVGTALIKKYPKLESEFVYGDYKVYDVRKMIAKSEQEIGKATAKYFFYSNIMNFFKTEITLANGEIRKRPLIETNGETGEIVWDKGRDFATVRKVLSMPQVNIVKKTEVQTGGFSKESILPKRNSDKLIARKKDWDPKKYGGFVSPTVAYSVLVVAKVEKGKSKKLKSVKELLGITIMERSSFEKNPIDFLEAKGYKEVKKDLIIKLPKYSLFELENGRKRMLASARELQKGNELALPSKYVNFLYLASHYEKLKGSPEDNEQKQLFVEQHKHYLDEIIEQISEFSKRVILADANLDKVLSAYNKHRDKPIREQAENIIHLFTLTNLGAPAAFKYFDTTIDRKQYRSTKEVLDATLIHQSITGLYETRIDLSQLGGDEGADKRTADGSEFESPKKKRKV

SEQ ID NO: 354 - protein, 1588 aa, synthetic construct
  REGION 1..1588: note = 14. monoABE8.1_bpNLS + V82S +Q154R polypeptide sequence
MSEVEFSHEYWMRHALTLAKRARDEREVPVGAVLVLNNRVIGEGWNRAIGLHDPTAHAEIMALRQGGLVMQNYRLIDATLYSTFEPCVMCAGAMIHSRIGRVVFGVRNAKTGAAGSLMDVLHYPGMNHRVEITEGILADECAALLCYFFRMPRRVFNAQKKAQSSTDSGGSSGGSSGSETPGTSESATPESSGGSSGGSDKKYSIGLAIGTNSVGWAVITDEYKVPSKKFKVLGNTDRHSIKKNLIGALLFDSGETAEATRLKRTARRRYTRRKNRICYLQEIFSNEMAKVDDSFFHRLEESFLVEEDKKHERHPIFGNIVDEVAYHEKYPTIYHLRKKLVDSTDKADLRLIYLALAHMIKFRGHFLIEGDLNPDNSDVDKLFIQLVQTYNQLFEENPINASGVDAKAILSARLSKSRRLENLIAQLPGEKKNGLFGNLIALSLGLTPNFKSNFDLAEDAKLQLSKDTYDDDLDNLLAQIGDQYADLFLAAKNLSDAILLSDILRVNTEITKAPLSASMIKRYDEHHQDLTLLKALVRQQLPEKYKEIFFDQSKNGYAGYIDGGASQEEFYKFIKPILEKMDGTEELLVKLNREDLLRKQRTFDNGSIPHQIHLGELHAILRRQEDFYPFLKDNREKIEKILTFRIPYYVGPLARGNSRFAWMTRKSEETITPWNFEEVVDKGASAQSFIERMTNFDKNLPNEKVLPKHSLLYEYFTVYNELTKVKYVTEGMRKPAFLSGEQKKAIVDLLFKTNRKVTVKQLKEDYFKKIECFDSVEISGVEDRFNASLGTYHDLLKIIKDKDFLDNEENEDILEDIVLTLTLFEDREMIEERLKTYAHLFDDKVMKQLKRRRYTGWGRLSRKLINGIRDKQSGKTILDFLKSDGFANRNFMQLIHDDSLTFKEDIQKAQVSGQGDSLHEHIANLAGSPAIKKGILQTVKVVDELVKVMGRHKPENIVIEMARENQTTQKGQKNSRERMKRIEEGIKELGSQILKEHPVENTQLQNEKLYLYYLQNGRDMYVDQELDINRLSDYDVDHIVPQSFLKDDSIDNKVLTRSDKNRGKSDNVPSEEVVKKMKNYWRQLLNAKLITQRKFDNLTKAERGGLSELDKAGFIKRQLVETRQITKHVAQILDSRMNTKYDENDKLIREVKVITLKSKLVSDFRKDFQFYKVREINNYHHAHDAYLNAVVGTALIKKYPKLESEFVYGDYKVYDVRKMIAKSEQEIGKATAKYFFYSNIMNFFKTEITLANGEIRKRPLIETNGETGEIVWDKGRDFATVRKVLSMPQVNIVKKTEVQTGGFSKESILPKRNSDKLIARKKDWDPKKYGGFVSPTVAYSVLVVAKVEKGKSKKLKSVKELLGITIMERSSFEKNPIDFLEAKGYKEVKKDLIIKLPKYSLFELENGRKRMLASARELQKGNELALPSKYVNFLYLASHYEKLKGSPEDNEQKQLFVEQHKHYLDEIIEQISEFSKRVILADANLDKVLSAYNKHRDKPIREQAENIIHLFTLTNLGAPAAFKYFDTTIDRKQYRSTKEVLDATLIHQSITGLYETRIDLSQLGGDEGADKRTADGSEFESPKKKRKV

SEQ ID NO: 355 - protein, 4 aa, synthetic construct
  REGION 1..4: note = synthetic peptide sequence
SGGS

SEQ ID NO: 356 - protein, 24 aa, synthetic construct
  REGION 1..24: note = synthetic peptide sequence
SGGSSGSETPGTSESATPESSGGS

SEQ ID NO: 357 - protein, 32 aa, synthetic construct
  REGION 1..32: note = synthetic polypeptide sequence
SGGSSGGSSGSETPGTSESATPESSGGSSGGS

SEQ ID NO: 358 - protein, 104 aa, synthetic construct
  REGION 1..104: note = synthetic polypeptide sequence
GGSGGSPGSPAGSPTSTEEGTSESATPESGPGTSTEPSEGSAPGSPAGSPTSTEEGTSTEPSEGSAPGTSTEPSEGSAPGTSESATPESGPGSEPATSGGSGGS

SEQ ID NO: 359 - protein, 24 aa, synthetic construct
  REGION 1..24: note = synthetic peptide sequence
SGGSSGGSSGSETPGTSESATPES

SEQ ID NO: 360 - protein, 40 aa, synthetic construct
  REGION 1..40: note = synthetic polypeptide sequence
SGGSSGGSSGSETPGTSESATPESSGGSSGGSSGGSSGGS

SEQ ID NO: 361 - protein, 64 aa, synthetic construct
  REGION 1..64: note = synthetic polypeptide sequence
SGGSSGGSSGSETPGTSESATPESSGGSSGGSSGGSSGGSSGSETPGTSESATPESSGGSSGGS

SEQ ID NO: 362 - protein, 92 aa, synthetic construct
  REGION 1..92: note = synthetic polypeptide sequence
PGSPAGSPTSTEEGTSESATPESGPGTSTEPSEGSAPGSPAGSPTSTEEGTSTEPSEGSAPGTSTEPSEGSAPGTSESATPESGPGSEPATS

SEQ ID NO: 363 - protein, 5 aa, synthetic construct
  REGION 1..5: note = synthetic peptide sequence
PAPAP

SEQ ID NO: 364 - protein, 6 aa, synthetic construct
  REGION 1..6: note = synthetic peptide sequence
PAPAPA

SEQ ID NO: 365 - protein, 7 aa, synthetic construct
  REGION 1..7: note = synthetic peptide sequence
PAPAPAP

SEQ ID NO: 366 - protein, 8 aa, synthetic construct
  REGION 1..8: note = synthetic peptide sequence
PAPAPAPA

SEQ ID NO: 367 - protein, 9 aa, synthetic construct
  REGION 1..9: note = synthetic peptide sequence
PAPAPAPAP

SEQ ID NO: 368 - protein, 15 aa, synthetic construct
  REGION 1..15: note = synthetic peptide sequence
PAPAPAPAPAPAPAP

SEQ ID NO: 369 - protein, 21 aa, synthetic construct
  REGION 1..21: note = synthetic peptide sequence
PAPAPAPAPAPAPAPAPAPAP

SEQ ID NO: 370 - DNA, 306 bp, synthetic construct
  misc_feature 1..306: note = DnaE Intein-N polynucleotide sequence
  source 1..306: mol_type = other DNA
tgcctgtcatacgaaaccgagatactgacagtagaatatggccttctgccaatcgggaagattgtggagaaacggatagaatgcacagtttactctgtcgataacaatggtaacatttatactcagccagttgcccagtggcacgaccggggagagcaggaagtattcgaatactgtctggaggatggaagtctcattagggccactaaggaccacaaatttatgacagtcgatggccagatgctgcctatagacgaaatctttgagcgagagttggacctcatgcgagttgacaaccttcctaat

SEQ ID NO: 371 - protein, 102 aa, synthetic construct
  REGION 1..102: note = DnaE Intein-N polypeptide sequence
CLSYETEILTVEYGLLPIGKIVEKRIECTVYSVDNNGNIYTQPVAQWHDRGEQEVFEYCLEDGSLIRATKDHKFMTVDGQMLPIDEIFERELDLMRVDNLPN

SEQ ID NO: 372 - DNA, 108 bp, synthetic construct
  misc_feature 1..108: note = DnaE Intein-C polynucleotide sequence
  source 1..108: mol_type = other DNA
atgatcaagatagctacaaggaagtatcttggcaaacaaaacgtttatgatattggagtcgaaagagatcacaactttgctctgaagaacggattcatagcttctaat

SEQ ID NO: 373 - protein, 36 aa, synthetic construct
  REGION 1..36: note = DnaE Intein-C polypeptide sequence
MIKIATRKYLGKQNVYDIGVERDHNFALKNGFIASN

SEQ ID NO: 374 - DNA, 303 bp, synthetic construct
  misc_feature 1..303: note = Cfa-N polynucleotide sequence
  source 1..303: mol_type = other DNA
tgcctgtcttatgataccgagatacttaccgttgaatatggcttcttgcctattggaaagattgtcgaagagagaattgaatgcacagtatatactgtagacaagaatggtttcgtttacacacagcccattgctcaatggcacaatcgcggcgaacaagaagtatttgagtactgtctcgaggatggaagcatcatacgagcaactaaagatcataaattcatgaccactgacgggcagatgttgccaatagatgagatattcgagcggggcttggatctcaaacaagtggatggattgcca

SEQ ID NO: 375 - protein, 101 aa, synthetic construct
  REGION 1..101: note = Cfa-N polypeptide sequence
CLSYDTEILTVEYGFLPIGKIVEERIECTVYTVDKNGFVYTQPIAQWHNRGEQEVFEYCLEDGSIIRATKDHKFMTTDGQMLPIDEIFERGLDLKQVDGLP

SEQ ID NO: 376 - DNA, 159 bp, synthetic construct
  misc_feature 1..159: note = Cfa-C polynucleotide sequence
  source 1..159: mol_type = other DNA
atgaagaggactgccgatggatcagagtttgaatctcccaagaagaagaggaaagtaaagataatatctcgaaaaagtcttggtacccaaaatgtctatgatattggagtggagaaagatcacaacttccttctcaagaacggtctcgtagccagcaac

SEQ ID NO: 377 - protein, 53 aa, synthetic construct
  REGION 1..53: note = Cfa-C polypeptide sequence
MKRTADGSEFESPKKKRKVKIISRKSLGTQNVYDIGVEKDHNFLLKNGLVASN

SEQ ID NO: 378 - protein, 1081 aa, Neisseria meningitidis
  REGION 1..1081: note = MISC_FEATURE - Nme3Cas9; WP_002217928.1 type II CRISPR RNA-guided endonuclease Cas9 [Neisseria meningitidis]
  REGION 1..1081: note = MISC_FEATURE - NCBI Reference: WP_002217928.1; type II CRISPR RNA-guided endonuclease Cas9; Nme3Cas9 polypeptide sequence
MAAFKPNPINYILGLDIGIASVGWAMVEIDEEENPIRLIDLGVRVFERAEVPKTGDSLAMARRLARSVRRLTRRRAHRLLRARRLLKREGVLQAADFDENGLIKSLPNTPWQLRAAALDRKLTPLEWSAVLLHLIKHRGYLSQRKNEGETADKELGALLKGVADNAHALQTGDFRTPAELALNKFEKECGHIRNQRGDYSHTFSRKDLQAELNLLFEKQKEFGNPHVSGGLKEGIETLLMTQRPALSGDAVQKMLGHCTFEPAEPKAAKNTYTAERFIWLTKLNNLRILEQGSERPLTDTERATLMDEPYRKSKLTYAQARKLLSLEDTAFFKGLRYGKDNAEASTLMEMKAYHTISRALEKEGLKDKKSPLNLSPELQDEIGTAFSLFKTDEDITGRLKDRIQPEILEALLKHISFDKFVQISLKALRRIVPLMEQGKRYDEACAEIYGDHYGKKNTEEKIYLPPIPADEIRNPVVLRALSQARKVINGVVRRYGSPARIHIETAREVGKSFKDRKEIEKRQEENRKDREKAAAKFREYFPNFVGEPKSKDILKLRLYEQQHGKCLYSGKEINLGRLNEKGYVEIDHALPFSRTWDDSFNNKVLVLGSENQNKGNQTPYEYFNGKDNSREWQEFKARVETSRFPRSKKQRILLQKFDEDGFKERNLNDTRYVNRFLCQFVADRMRLTGKGKKRVFASNGQITNLLRGFWGLRKVRAENDRHHALDAVVVACSTVAMQQKITRFVRYKEMNAFDGKTIDKETGEVLHQKTHFPQPWEFFAQEVMIRVFGKPDGKPEFEEADTPEKLRTLLAEKLSSRPEAVHEYVTPLFVSRAPNRKMSGQGHMETVKSAKRLDEGVSVLRVPLTQLKLKDLEKMVNREREPKLYEALKARLEAHKDDPAKAFAEPFYKYDKAGNRTQQVKAVRVEQVQKTGVWVRNHNGIADNATMVRVDVFEKGDKYYLVPIYSWQVAKGILPDRAVVAYADEEDWTVIDESFRFKFVLYSNDLIKVQLKKDSFLGYFSGLDRATGAISLREHDLEKSKGKDGMHRIGVKTALSFQKYQIDEMGKEIRPCRLKKRPPVR

SEQ ID NO: 379 - RNA, 66 nt, synthetic construct
  misc_feature 1..66: note = Telomerase Ku Binding Motif oligonucleotide sequence
  source 1..66: mol_type = other RNA
ttcttgtcgtacttatagatcgctacgttatttcaattttgaaaatctgagtcctgggagtgcgga

SEQ ID NO: 380 - protein, 1094 aa, synthetic construct
  REGION 1..1094: note = Telomerase Ku Heterodimer polypeptide sequence
MSGWESYYKTEGDEEAEEEQEENLEASGDYKYSGRDSLIFLVDASKAMFESQSEDELTPFDMSIQCIQSVYISKIISSDRDLLAVVFYGTEKDKNSVNFKNIYVLQELDNPGAKRILELDQFKGQQGQKRFQDMMGHGSDYSLSEVLWVCANLFSDVQFKMSHKRIMLFTNEDNPHGNDSAKASRARTKAGDLRDTGIFLDLMHLKKPGGFDISLFYRDIISIAEDEDLRVHFEESSKLEDLLRKVRAKETRKRALSRLKLKLNKDIVISVGIYNLVQKALKPPPIKLYRETNEPVKTKTRTFNTSTGGLLLPSDTKRSQIYGSRQIILEKEETEELKRFDDPGLMLMGFKPLVLLKKHHYLRPSLFVYPEESLVIGSSTLFSALLIKCLEKEVAALCRYTPRRNIPPYFVALVPQEEELDDQKIQVTPPGFQLVFLPFADDKRKMPFTEKIMATPEQVGKMKAIVEKLRFTYRSDSFENPVLQQHFRNLEALALDLMEPEQAVDLTLPKVEAMNKRLGSLVDEFKELVYPPDYNPEGKVTKRKHDNEGSGSKRPKVEYSEEELKTHISKGTLGKFTVPMLKEACRAYGLKSGLKKQELLEALTKHFQDMVRSGNKAAVVLCMDVGFTMSNSIPGIESPFEQAKKVITMFVQRQVFAENKDEIALVLFGTDGTDNPLSGGDQYQNITVHRHLMLPDFDLLEDIESKIQPGSQQADFLDALIVSMDVIQHETIGKKFEKRHIEIFTDLSSRFSKSQLDIIIHSLKKCDISERHSIHWPCRLTIGSNLSIRIAAYKSILQERVKKTWTVVDAKTLKKEDIQKETVYCLNDDDETEVLKEDIIQGFRYGSDIVPFSKVDEEQMKYKSEGKCFSVLGFCKSSQVQRRFFMGNQVLKVFAARDDEAAAVALSSLIHALDDLDMVAIVRYAYDKRANPQVGVAFPHIKHNYECLVYVQLPFMEDLRQYMFSSLKNSKKYAPTEAQLNAVDALIDSMSLAKKDEKTDTLEDLFPTTKIPNPRFQRLFQCLLHRALHPREPLPPIQQHIWNMLNPPAEVTTKSQIPLSKIKTLFPLIEAKKKDQVTAQEIFQDNHEDGPTAK

SEQ ID NO: 381 - RNA, 10 nt, synthetic construct
  misc_feature 1..10: note = Telomerase Sm7 consensus site(single stranded) oligonucleotide sequence
  source 1..10: mol_type = other RNA
aatttttgga

SEQ ID NO: 382 - protein, 83 aa, synthetic construct
  REGION 1..83: note = MS2 coat protein polypeptide sequence
GSVIDVSSQRVNVQRPLDALGNSLNSPVIIKLKGDREFRGVLKSFDLHMNLVLNDAEELEDGEVTRRLGTVLIRGDNIVYISP

SEQ ID NO: 383 - RNA, 26 nt, synthetic construct
  misc_feature 1..26: note = PP7 phage operator stem loop oligonucleotide sequence
  source 1..26: mol_type = other RNA
ataaggagtttatatggaaaccctta

SEQ ID NO: 384 - protein, 128 aa, synthetic construct
  REGION 1..128: note = PP7 coat protein (PCP)polypeptide sequence
MSKTIVLSVGEATRTLTEIQSTADRQIFEEKVGPLVGRLRLTASLRQNGAKTAYRVNLKLDQADVVDCSTSVCGELPKVRYTQVWSHDVTIVANSTEASRKSLYDLTKSLVATSQVEDLVVNLVPLGR

SEQ ID NO: 385 - RNA, 19 nt, synthetic construct
  misc_feature 1..19: note = SfMu Com stem loop oligonucleotide sequence
  source 1..19: mol_type = other RNA
ctgaatgcctgcgagcatc

SEQ ID NO: 386 - protein, 62 aa, synthetic construct
  REGION 1..62: note = SfMu Com binding protein polypeptide sequence
MKSIRCKNCNKLLFKADSFDHIEIRCPRCKRHIIMLNACEHPTEKHCGKREKITHSDETVRY

SEQ ID NO: 387 - protein, 47 aa, synthetic construct
  REGION 1..47: note = leucine zipper polypeptide sequence
LEIRAAFLRQRNTALRTEVAELEQEVQRLENEVSQYETRYGPLGGGK

SEQ ID NO: 388 - protein, 47 aa, synthetic construct
  REGION 1..47: note = leucine zipper polypeptide sequence
LEIEAAFLERENTALETRVAELRQRVQRLRNRVSQYRTRYGPLGGGK

SEQ ID NO: 389 - DNA, 303 bp, synthetic construct
  source 1..303: mol_type = other DNA
tgcctgagctacgataccgagatcctgaccgtggaatacggcttcctgcctatcggcaagatcgtcgaggaacggatcgagtgcacagtgtacaccgtggataagaatggcttcgtgtacacccagcctatcgctcagtggcacaacagaggcgagcaagaggtgttcgagtactgcctggaagatggcagcatcatccgggccaccaaggaccacaagtttatgaccaccgacggccagatgctgcccatcgacgagatctttgagagaggcctggacctgaaacaggtggacggactgcct

SEQ ID NO: 390 - protein, 101 aa, synthetic construct; identical to SEQ ID NO: 375

SEQ ID NO: 391 - DNA, 264 bp, synthetic construct
  source 1..264: mol_type = other DNA
tgtctggacctcaagacccaagtgcagacacctcagggcatgaaagagattagcaatatccaggtgggcgacctggtcctgagcaacaccggctacaacgaggtgctgaacgtgttccctaagtccaagaagaaatcttataagatcaccctggaagatggcaaggaaatcatctgcagcgaggaacacctgttccccacccagaccggcgagatgaacatcagcggcggactgaaggagggcatgtgcctgtacgtgaaggag

SEQ ID NO: 392 - protein, 88 aa, synthetic construct
CLDLKTQVQTPQGMKEISNIQVGDLVLSNTGYNEVLNVFPKSKKKSYKITLEDGKEIICSEEHLFPTQTGEMNISGGLKEGMCLYVKE

SEQ ID NO: 393 - DNA, 267 bp, synthetic construct
  source 1..267: mol_type = other DNA
tgcctgagcctggacaccatggtggtgacaaacggcaaggccatcgagatcagagatgtgaaggtgggagattggctggaaagcgaatgtggcccagtgcaggttacagaggtgctgcctatcatcaagcagcctgtctttgagattgtgctgaaaagcggaaaaaagatccgggtgtccgctaatcacaagttccccaccaaggacggcctcaagaccatcaacagcggcctgaaggtgggcgacttcctgagaagcagagccaag

SEQ ID NO: 394 - protein, 89 aa, synthetic construct
CLSLDTMVVTNGKAIEIRDVKVGDWLESECGPVQVTEVLPIIKQPVFEIVLKSGKKIRVSANHKFPTKDGLKTINSGLKVGDFLRSRAK

SEQ ID NO: 395 - DNA, 303 bp, synthetic construct
  source 1..303: mol_type = other DNA
tgttttgtgcctggcaccctggtgaacacagagaatggcctgaagaaaatcgaggaaatcaaggtgggcgacaaggtgttcagccatacaggcaagctgcaggaggtggtggacaccctgatcttcgaccgggacgaggaaatcatctctatcaacggcattgattgcaccaagaaccacgagttctacgtgatcgataaggaaaacgctaatagagtgaacgaggacaacatccacctcttcgccagatgggtccacgccgaggaactggatatgaaaaagcacctgctgatcgagctggaa

SEQ ID NO: 396 - protein, 101 aa, synthetic construct
CFVPGTLVNTENGLKKIEEIKVGDKVFSHTGKLQEVVDTLIFDRDEEIISINGIDCTKNHEFYVIDKENANRVNEDNIHLFARWVHAEELDMKKHLLIELE

SEQ ID NO: 397 - DNA, 315 bp, synthetic construct
  source 1..315: mol_type = other DNA
tgcctggtgggctctagcgagattatcacaagaaactacggcaagaccaccatcaaggaagtggtcgagatcttcgacaacgacaagaatatccaggtgctggccttcaacacccacaccgataatatcgagtgggcccctatcaaggccgctcagctgaccagacctaacgccgagctggttgaactggaaatcgacaccctgcacggcgtgaaaacaatccggtgcacccctgaccaccccgtgtacaccaagaacagaggctacgtgcgggccgacgagctgacagatgatgacgagctcgtggtggctatc

SEQ ID NO: 398 - protein, 105 aa, synthetic construct
CLVGSSEIITRNYGKTTIKEVVEIFDNDKNIQVLAFNTHTDNIEWAPIKAAQLTRPNAELVELEIDTLHGVKTIRCTPDHPVYTKNRGYVRADELTDDDELVVAI

SEQ ID NO: 399 - DNA, 306 bp, synthetic construct
  source 1..306: mol_type = other DNA
tgcctgagctacgagacagagatcctgaccgtggaatatggcctgctgccaatcggaaagatcgtggaaaagcggatcgagtgcaccgtctacagcgtggacaacaacggaaatatctatacacagcctgtggcccaatggcacgaccggggcgaacaggaggtgtttgagtactgcctggaagatggttctctgattagagccaccaaggaccacaagttcatgaccgtcgacggccagatgctgcccatcgacgaaatcttcgagcgggaactcgacctgatgagagtggataacctgcccaat

SEQ ID NO: 400 - protein, 102 aa, synthetic construct; identical to SEQ ID NO: 371

SEQ ID NO: 401 - protein, 101 aa, synthetic construct; identical to SEQ ID NO: 375

SEQ ID NO: 402 - protein, 102 aa, synthetic construct; identical to SEQ ID NO: 371

SEQ ID NO: 403 - DNA, 279 bp, synthetic construct
  source 1..279: mol_type = other DNA
acaagaagcggatactgtctggacctcaagacccaagtgcagacacctcagggcatgaaagagattagcaatatccaggtgggcgacctggtcctgagcaacaccggctacaacgaggtgctgaacgtgttccctaagtccaagaagaaatcttataagatcaccctggaagatggcaaggaaatcatctgcagcgaggaacacctgttccccacccagaccggcgagatgaacatcagcggcggactgaaggagggcatgtgcctgtacgtgaaggag

SEQ ID NO: 404 - protein, 93 aa, synthetic construct
TRSGYCLDLKTQVQTPQGMKEISNIQVGDLVLSNTGYNEVLNVFPKSKKKSYKITLEDGKEIICSEEHLFPTQTGEMNISGGLKEGMCLYVKE

SEQ ID NO: 405 - DNA, 282 bp, synthetic construct
  source 1..282: mol_type = other DNA
tctcagctgaaccggtgcctgagcctggacaccatggtggtgacaaacggcaaggccatcgagatcagagatgtgaaggtgggagattggctggaaagcgaatgtggcccagtgcaggttacagaggtgctgcctatcatcaagcagcctgtctttgagattgtgctgaaaagcggaaaaaagatccgggtgtccgctaatcacaagttccccaccaaggacggcctcaagaccatcaacagcggcctgaaggtgggcgacttcctgagaagcagagccaag

SEQ ID NO: 406 - protein, 94 aa, synthetic construct
SQLNRCLSLDTMVVTNGKAIEIRDVKVGDWLESECGPVQVTEVLPIIKQPVFEIVLKSGKKIRVSANHKFPTKDGLKTINSGLKVGDFLRSRAK

SEQ ID NO: 407 - DNA, 318 bp, synthetic construct
  source 1..318: mol_type = other DNA
ggcatcggcggaggatgttttgtgcctggcaccctggtgaacacagagaatggcctgaagaaaatcgaggaaatcaaggtgggcgacaaggtgttcagccatacaggcaagctgcaggaggtggtggacaccctgatcttcgaccgggacgaggaaatcatctctatcaacggcattgattgcaccaagaaccacgagttctacgtgatcgataaggaaaacgctaatagagtgaacgaggacaacatccacctcttcgccagatgggtccacgccgaggaactggatatgaaaaagcacctgctgatcgagctggaa

SEQ ID NO: 408 - protein, 106 aa, synthetic construct
GIGGGCFVPGTLVNTENGLKKIEEIKVGDKVFSHTGKLQEVVDTLIFDRDEEIISINGIDCTKNHEFYVIDKENANRVNEDNIHLFARWVHAEELDMKKHLLIELE

SEQ ID NO: 409 - DNA, 330 bp, synthetic construct
  source 1..330: mol_type = other DNA
ggaacaaacccatgttgcctggtgggctctagcgagattatcacaagaaactacggcaagaccaccatcaaggaagtggtcgagatcttcgacaacgacaagaatatccaggtgctggccttcaacacccacaccgataatatcgagtgggcccctatcaaggccgctcagctgaccagacctaacgccgagctggttgaactggaaatcgacaccctgcacggcgtgaaaacaatccggtgcacccctgaccaccccgtgtacaccaagaacagaggctacgtgcgggccgacgagctgacagatgatgacgagctcgtggtggctatc

SEQ ID NO: 410 - protein, 110 aa, synthetic construct
GTNPCCLVGSSEIITRNYGKTTIKEVVEIFDNDKNIQVLAFNTHTDNIEWAPIKAAQLTRPNAELVELEIDTLHGVKTIRCTPDHPVYTKNRGYVRADELTDDDELVVAI

SEQ ID NO: 411 - DNA, 105 bp, synthetic construct
  source 1..105: mol_type = other DNA
gtcaagatcatcagcagaaagagcctgggcacccagaacgtgtacgatatcggagtgggcgagccccacaactttctgctcaagaatggcctggtggccagcaac

SEQ ID NO: 412 - protein, 35 aa, synthetic construct
VKIISRKSLGTQNVYDIGVGEPHNFLLKNGLVASN

SEQ ID NO: 413 - DNA, 114 bp, synthetic construct
  source 1..114: mol_type = other DNA
atgatgctgaaaaagatcctgaagatcgaggaactggatgagagagagctgatcgacatcgaagtgtctggcaatcacctgttctacgccaacgacatcctgacccacaacagc

SEQ ID NO: 414 - protein, 38 aa, synthetic construct
MMLKKILKIEELDERELIDIEVSGNHLFYANDILTHNS

SEQ ID NO: 415 - DNA, 138 bp, synthetic construct
  source 1..138: mol_type = other DNA
atgtgcgaaatcttcgagaacgagattgattgggacgaaatcgcctctatcgagtacgtgggcgtggaagagacaatcgacatcaacgtgaccaacgacagactgtttttcgccaatggcatcctgacccacaacagc

SEQ ID NO: 416 - protein, 46 aa, synthetic construct
MCEIFENEIDWDEIASIEYVGVEETIDINVTNDRLFFANGILTHNS

SEQ ID NO: 417 - DNA, 123 bp, synthetic construct
  source 1..123: mol_type = other DNA
atgaaattcaagctgaaggaaatcaccagcatcgagacaaagcactacaagggcaaggtgcacgatctgaccgtgaaccaggaccacagctacaacgtcagaggcaccgtggtgcataattct

SEQ ID NO: 418 - protein, 41 aa, synthetic construct
MKFKLKEITSIETKHYKGKVHDLTVNQDHSYNVRGTVVHNS

SEQ ID NO: 419 - DNA, 123 bp, synthetic construct
  source 1..123: mol_type = other DNA
atggaagccaagacctacatcggcaagctgaaatctagaaagatcgtgtccaacgaggatacatacgacatccagaccagcacccacaatttcttcgccaacgacatcctggtgcacaacagc

SEQ ID NO: 420 - protein, 41 aa, synthetic construct
MEAKTYIGKLKSRKIVSNEDTYDIQTSTHNFFANDILVHNS

SEQ ID NO: 421 - DNA, 108 bp, synthetic construct
  source 1..108: mol_type = other DNA
atgatcaagatcgccacaagaaagtacctgggcaagcagaacgtgtacgacatcggcgtggagagagaccacaacttcgccctgaagaacggctttatcgcctctaat

SEQ ID NO: 422 - protein, 36 aa, synthetic construct; identical to SEQ ID NO: 373

SEQ ID NO: 423 - protein, 36 aa, synthetic construct
MVKIISRKSLGTQNVYDIGVGEPHNFLLKNGLVASN

SEQ ID NO: 424 - protein, 35 aa, synthetic construct
IKIATRKYLGKQNVYDIGVERDHNFALKNGFIASN

SEQ ID NO: 425 - DNA, 88 bp, synthetic construct
  source 1..88: mol_type = other DNA; note = SaCas9 scaffold sequence
gttttagtactctgtaatgaaaattacagaatctactaaaacaaggcaaaatgccgtgtttatctcgtcaacttgttggcgagatttt

SEQ ID NO: 426 - protein, 127 aa, synthetic construct
EVQLVESGGGLVQPGGSLRLSCAASGFALDGYTIGWFRQAPGKEREGVACISRSDTSTKYADSVKGRFTISRDNAKRTVSLQMNSLKPEDTAVYYCAASLQSGLLSRFLLPRQYDHWGQGTQVTVSS

SEQ ID NO: 427 - protein, 127 aa, synthetic construct
QLQLVESGGGLVQPGGSLRLSCVASGFALDSYTIGWFRQAPGKEREGLSCISRSTSDARYADSVKGRFTISRDNAKTTVSLLMSSLKPEDTAVYYCAASRQTGLLSTFLLPRQYDHWGQGTQVTVSS

SEQ ID NO: 428 - protein, 127 aa, synthetic construct
QVQLVESGGGLVQPGGSLRLSCAASGFSLDFYSIGWFRQAPGKEREGVSCITWSGERTNYKDSVKGRFTISRDDAKATVFLQMNNLKPEDTAVYYCAADSGYPCYGSSWSSVGYDFWGQGTQVTVSS

SEQ ID NO: 429 - protein, 119 aa, synthetic construct
QVQLVESGGGSVEPGGSLRLSCATSGLILSNHGMGWARQVPGKEVEWVSGSYTDGSTYYADSVKGRFTISRDNVKNTVYLQMNSLKPEDTAVYYCAARQYYRSGYVDYWGQGTQVTVSS

SEQ ID NO: 430 - protein, 120 aa, synthetic construct
QVQLVESGGGKVQPGGSLRLSCAASGFTFSNYGMMWVRQAPGKGLEWVSYIDSGGGSTYYTDSVRGRFTISRDNAKNTVYLQMNSLKPEDTAVYYCAKAIGVVSGSLEVWGQGTLVTVSS

SEQ ID NO: 431 - protein, 121 aa, synthetic construct
QVQLVESGGGLVQAGGSLRLSCAASGRTFTSYAMGWFRQAPGKEREFVAAISWRGVNTYYADSVKGRFTISRENAKNTVYLQMISLKPEDTAVYYCAAGPLGATMSEIGSWGQGTQVTVSS

SEQ ID NO: 432 - protein, 121 aa, synthetic construct
EVQLVESGGGLVQAGGSLRLSCAASGRTFSNYAMGWFRQAPGKEREFVSAISWSGGSTYYADSVKGRFTISRDNAKNTVYLQMISLKPEDTAVYYCAAGPLGATMSEIGSWGQGTQVTVSS

SEQ ID NO: 433 - protein, 121 aa, synthetic construct
QVQLVESGGGLVQAGGSLRLSCAASGRTVSSYAMGWFRQAPGKEREFVAAISWSGGGTYYADSVKGRFTISRDNAKNTVYLQMISLKPEDTAVYYCAAGPLGATMSEIGSWGQGTQVTVSS

SEQ ID NO: 434 - protein, 121 aa, synthetic construct
QVQLVESGGGLVQAGGSLRLSCAASGRTVSSYAMGWFRQAPGKEREFVAAISWSGGSTYYADSVKGRFTISRDNAKNTVYLQMISLKPEDTAVYYCAAGPLGATMSEIGSWGQGTQVTVSS

SEQ ID NO: 435 - protein, 124 aa, synthetic construct
EVQLVESGGGLAQPGGSLRLSCVASGFAFGSFAIDWVRQPPGKGPEWVSAINRGGDRTYYSDSVKGRFTISRDNAKNTLYLQLNSLKPEDTAVYLCAAGGRVSADGKKWEYDYWGQGTQVTVSS

SEQ ID NO: 436 - protein, 124 aa, synthetic construct
EVQLVESGGGLVHAGGSLRLSCAASGRTFNTMAWFRQAPGKEREFVAAIAWNSGLTYYGDSVKGRFTIFRDNAKNLAYLQMNSLKPEDTAVYSCAARRTFRTGLINTVTAYDTWGQGTQVTVSS

SEQ ID NO: 437 - protein, 124 aa, synthetic construct
EVQLVESGGGLVHAGGSLRLSCVASGRTFNTMAWFRQAPGKEREFVAAISWSGGLTYYGDSVKGRFTIFRDNAKNLAYLQMNSLKPEDTAVYSCAARRTFRTALINTITAYDTWGQGTQVTVSS

SEQ ID NO: 438 - protein, 116 aa, synthetic construct
EVQLVESGGGLVQAGGSLRLSCAASGNIVDIDDMGWYRQAPGRDLVASITAGGITKYADSAKGRFTISRDNVKNTVYLQMNSLKPEDTATYYCYAVRRYYPRFDYWGQGTQVTVSS

SEQ ID NO: 439 - protein, 118 aa, synthetic construct
EVQLVESGGGLVQAGGSLRLSCAASGNIVEIDDMGWYRQAPGKQRDLVATITAGGITNYASSAKGRFTISRDNVKNTVYLQMNSLKPEDTATYYCYAIRKYYPRFDYWGQGTQVTVSS

SEQ ID NO: 440 - protein, 121 aa, synthetic construct
EVQLVESGGGLVQAGGSLRLSCAASGRTFRSYAMGWFRQAPGKEREFVAAISWSGGRIYYADSVKGRFTISRDNAKNTVYLQMNSLKPEDTAVYYCAADDFERTMTEVRYWGQGTQVTVSS

SEQ ID NO: 441 - protein, 122 aa, synthetic construct
EVQLVESGGGLVQPGGSLRLSCAASGFTFSGYYMSWVRQAPGKGLEWVSSIYSDDSNTYYADSVKGRFTISRDNAKNTVYLQMNSLKPEDTAVYYCAASATLRGRDTRFDYWGQGTQVTVSS

SEQ ID NO: 442 - protein, 124 aa, synthetic construct
EVQLVESGGGLVQPGGSLRLSCSASGFPFDDYSMDWVRQAPGKGLEWVSAINRNGGSTYYAESMKGRFTISRDNAKNTLYLQMSSLKPEDTGVYLCAAGGRVSADGKKWEYDYWGQGTQVTVSS

SEQ ID NO: 443 - protein, 113 aa, synthetic construct
QLQLVESGGGLVQAGGSLRLSCAASDPIVTFNTMGWYRQAPGKQRELVARITMSGIPNYADSVKGRFTISRDNAKNTLYLQMNSLKPEDSAVYYCRAEHSGYWGQGTQVTVSS

SEQ ID NO: 444 - protein, 118 aa, synthetic construct
QLQLVESGGGLVQAGGSLRLSCAASGNIVDIDDMGWYRQAPGKQRDLVATITAGGIANYADSAKGRFTISRDNAKNTVYLQMNSLKPEDTATYYCYAIRRYYPRFDYWGQGAQVTVSS

SEQ ID NO: 445 - protein, 122 aa, synthetic construct
QLQLVESGGGLVQAGGSLRLSCAASGRTVSSYAMGWFRQAPGKEREFVAAISWSGGSTYYADSVKGRFTISRDNAKNTVYLQMNSLKPEDTAVYYCAADPSLSRTMDEIGSWGQGTQVTVSS

SEQ ID NO: 446 - protein, 118 aa, synthetic construct
QLQLVESGGGLVQTGGSLNLSCAASGAFVSIDAMAWYRQAPGKARELVAFSSSGGITNYADSVKGRFTITRDNAKNTVYLQMNSLKPEDTAVYYCNADILQSGWYTYWGQGTQVTVSS

SEQ ID NO: 447 - protein, 123 aa, synthetic construct
QLQLVESGGGLVRAGGSLRLSCVLSGRTFSSYAMGWFRQAPGKEREFVSTISLSGGSTFYSDSAKGRFTISRDNAKNTVYLQMNSLKPEDAAVYYCAARPVLISRSSTDYAYWGPGTQVTVSS

SEQ ID NO: 448 - protein, 123 aa, synthetic construct
QLQLVESGGGLVRAGGSLRLSCVLSGRTFSSYAMGWFRQAPGKEREFVSTISLSGGSTFYSDSAKGRFTISRDNAKNTVYLQMNSLKPEDTAVYYCAARPVLISRSSIDYAYWGPGTQVTVSS

SEQ ID NO: 449 - protein, 124 aa, synthetic construct
QVQLQESGGGLVQAGETLGLSCVHSGRAFSGHGMGWFRQAPGKEREFVAAISWSGVSTAYADSVKGRFTISRVNADNTVSLQMNSLKPEDTAVYFCAAGLYSRPTTERREYIYWGQGTQVTVSS

SEQ ID NO: 450 - protein, 118 aa, synthetic construct
QVQLQESGGGLVQAGGSLRLSCAASGNSVDIDDMGWYRQAPGKQRDLVATITAGGITKYGDSAKGRFTISRDNVKNTVYLQMNSLKPEDTATYYCYAVRRYYPRFDYWGQGTQVTVSS

SEQ ID NO: 451 - protein, 121 aa, synthetic construct
QVQLQESGGGLVQPGGSLRLSCAASGSIFSMNAMGWYRQAPGKQRELVATITDNDFTYYAASVKDRFTISRGNAKNTVYLQMNSLTPEDTAVYYCNADGIYSGGRYYPSSWGQGTQVTVSS

SEQ ID NO: 452 - protein, 129 aa, synthetic construct
QVQLQESGGGLVQPGGSLRLSCAASGSIFSVNDMGWYRQAPGKQRELVAASYSGGSTNYADSVKGRFTISRDNAKNTVYLQMNSLLPEDTAVYYCNADLVVVTTTPPSFPMPYRFLEVWGQGTLVTVSS

SEQ ID NO: 453 - protein, 124 aa, synthetic construct
QVQLVESGGGLVHAGGSLRLSCAASGRTFNTMAWFRQAPGKEREFVAAISWSGGLTYYADSVKGRFTIFRDNAKGLAYLQMDSLKPEDTAVYSCAARRTFRTALINTVTAYDTWGQGTQVTVSS

SEQ ID NO: 454 - protein, 124 aa, synthetic construct
QVQLVESGGGLVHAGGSLRLSCAASGRTFNTMAWFRQAPGKEREFVAAISWSGGLTYYGDSVKGRFTIFRDNAKNLAYLQMNSLKPEDTAVYSCAARRTFRTGLIDTVTAYDTWGQGTQVTVSS

SEQ ID NO: 455 - protein, 118 aa, synthetic construct
QVQLVESGGGLVQAGDSLRLSCAAASGRALSGWQMGWYRQAPGKEREFVASISMSDGSTSYQDSVKGRFTISRDNALSTMSLRMNSLKSEDTAIYYCQGRSRFGFEYWGQGTQVTVSS

SEQ ID NO: 456 - protein, 126 aa, synthetic construct
QVQLVESGGGLVQAGESLRLSCVASGRALSGHGMGWFRQAPGKEREFVAAISWSGVSTAYADSVKGRFTISRVNAENTVSVSLQMNSLKPDDTAVYFCAAGLYSRPTTERRDYIYWGQGTQVTVSS

SEQ ID NO: 457 - protein, 119 aa, synthetic construct
QVQLVESGGGLVQAGGSLRLSCAAASHTFDSYTMGWFRQAPGKEREFVAAVNWDNVKNYADPVKGRFTISRDNVKNRVYLQMNSLKPEDTAVYYCAAGTNLPTRGSGSWGQGTQVTVSS

SEQ ID NO: 458 - protein, 119 aa, synthetic construct
QVQLVESGGGLVQAGGSLRLSCAAASLTFDSYTMGWFRQAPGKEREFVAAVNWDNVKNYADPVKGRFTISRDNVKNTVYLQMNSLKPEDTAVYYCAAGTNLPTIESGSWGQGTQVTVSS

SEQ ID NO: 459 - protein, 118 aa, synthetic construct
QVQLVESGGGLVQAGGSLRLSCAASGNGVDIDDMGWYRQAPGKQRDLVASITAGGITKYADSAKGRFTISRDNVKNTVYLQMNSLKPEDTATYYCYAIRRFYPRFDYWGQGTQVTVSS

SEQ ID NO: 460 - protein, 118 aa, synthetic construct
QVQLVESGGGLVQAGGSLRLSCAASGNGVDIDDMGWYRQAPGKQRDLVASITAGGITNYADSAKGRFTISRDNVKNTVYLQMNSLKPEDTATYYCYAIRRFYPRFDYWGQGTQVTVSS

SEQ ID NO: 461 - protein, 118 aa, synthetic construct
QVQLVESGGGLVQAGGSLRLSCAASGNGVDIDDMGWYRQAPGKQRDLVATITAGGITKYADSAKGRFTISRDNVKNTVYLQMNSLKPEDTATYYCYAIRRFYPRFDYWGQGTQVTVSS

SEQ ID NO: 462 - protein, 118 aa, synthetic construct
QVQLVESGGGLVQAGGSLRLSCAASGNGVDIDDMGWYRQAPGKQRDLVATITAGGITNYADSAKGRFTISRDNVKNTVYLQMNSLKPEDTGTYYCYAIRKFYPRFDYWGQGTQVTVSS

SEQ ID NO: 463 - protein, 118 aa, synthetic construct
QVQLVESGGGLVQAGGSLRLSCAASGNIVDIDDMGWYRQAPGKQRDLVASITAGGITKYADSAKGRFTISRDNVKNTVSLQMNSLKPEDTATYYCYAVRKYYPRFDYWGQGTQVTVSS

SEQ ID NO: 464 - protein, 118 aa, synthetic construct
QVQLVESGGGLVQAGGSLRLSCAASGNIVDIDDMGWYRQAPGKQRDLVASITAGRITKYADSAKGRFTISRDNVKNTVYLQMNSLKPEDTATYYCYAIRRSYPRFDYWGQGTQVTVSS

SEQ ID NO: 465 - protein, 119 aa, synthetic construct
QVQLVESGGGLVQAGGSLRLSCAASGRTFSNYAMGWFRQAPGKEREFVAAINWSGGRIYYTDSVKGRFTISRDNAKNTVYLQMNSLKPEDTAVYYCAAGTNWSIPPDYWGQGTQVTVSS

SEQ ID NO: 466 - protein, 123 aa, synthetic construct
QVQLVESGGGLVQAGGSLRLSCAASGRTFSSYAMGWFRQAPGKEREFVAAIRWSGGSTYYGDSVKGRFTISRDNAKNTVYLQMNSLKPEDTAVYYCAADPIGLGYEMGEYDYWGQGTQVTVSS

SEQ ID NO: 467 - protein, 122 aa, synthetic construct
QVQLVESGGGLVQAGGSLRLSCAASGRTFSSYAMGWFRQAPGKEREFVAAISWSGGSIYYADSVKGRFTISRDNAKNTVSLQMNSLKPEDTAVYYCAADGTLRTPMNLIHYWGQGTQVTVSS

SEQ ID NO: 468 - protein, 124 aa, synthetic construct
QVQLVESGGGLVQAGGSLRLSCAASGRTFSSYAMGWFRQAPGKEREFVAAISWSGGSTYYANSVKGRFTISRDNAKNTVYLQMNSLKPEDTAVYYCAPGEEVAGKYFRQLYDYWGQGTQVTVSS

SEQ ID NO: 469 - protein, 124 aa, synthetic construct
QVQLVESGGGLVQAGGSLRLSCAASGRTFSSYAMGWFRQAPGKEREFVADISWSGGTTNYANSVKGRFTISRDNAKNTVYLQMNSLKPEDTAVYYCAPGEEVDGKYFRPLYDYWGQGTQVTVSS

SEQ ID NO: 470 - protein, 124 aa, synthetic construct
QVQLVESGGGLVQAGGSLRLSCAASGRTFSTYTMGWFRQAPGKERQFVAAISSSGDSTYYTDSVKGRFTISRDNAKNTVYLQMDSLKPEDTAVYYCAPGEEVAGKYFRALYDYWGQGTQVTVSS

SEQ ID NO: 471 - protein, 124 aa, synthetic construct
QVQLVESGGGLVQAGGSLRLSCAASGSIFSINAMAWYRQAPGKQRELVAVITSGGSTNYADSVKGRFTISRDNAKNTVYLQMNSLKPEDTAVYYCNADLVYYSGNPGDYGMDYWGKGTLVTVSS

SEQ ID NO: 472 - protein, 115 aa, synthetic construct
QVQLVESGGGLVQAGGSLRLSCVASGRTFSINNINWYRQAPGKEREFVATTRWRGDSTYYADSVAGRFTISRDSAKNTVYLQMNSLKPEDTAIYYCNAKGGVDVWGQGTQVTVSS

SEQ ID NO: 473 - protein, 116 aa, synthetic construct
QVQLVESGGGLVQPGGSLRLSCAASGFLFSLYAMAWVRQAPGKGLEWVSDISNGGVTTRYADSVKGRFTISRDNAKNTLYLQMDSLTPGDTAVYYCAVTTTGWRARGQGTQVTVSS

SEQ ID NO: 474 - protein, 117 aa, synthetic construct
QVQLVESGGGLVQPGGSLRLSCAASGSIFRPNDMGWYRQAPGKQRELVAIITDGGITNYAATVKGRFTISRDNAKNTVYLQMNSLKPEDTAVYYCNLNIPYPRVSSWGQGTQVTVSS

SEQ ID NO: 475 - protein, 129 aa, synthetic construct
QVQLVESGGGLVQPGGSLRLSCAASGSIFSVNDMGWYRQAPGKQRELVAAIYSGGSTNYADSVKGRFTISRDNAKNTVYLQMNSLKPEDTAVYYCNADIVVVTTTPPSFPMPYRFLEVWGQGTLVTVSS

SEQ ID NO: 476 - protein, 124 aa, synthetic construct
QVQLVESGGGLVQPGGSLRLSCAASGSTFNTMAWFRQAPGKEREFVAAISWSGGLTYYGDSVKGRFTIFRDNAKNLGYLQMNSLKPEDTAVYSCAARTTFRTGLIVTVTAYDTWGQGTQVTVSS

SEQ ID NO: 477 - protein, 123 aa, synthetic construct
QVQLVESGGGLVQPGGSLRLSCVLSGRTFSSYAMGWFRQAPGKEREFVSTISLSGGSTFYSGSAKGRFTISRDNAKNTVYLQMNSLKPEDTAVYYCAARPVLISRSSTDYAYWGPGTQVTVSS

SEQ ID NO: 478 - skipped

SEQ ID NO: 479 - protein, 124 aa, synthetic construct
QVQLVESGGGLVQTGGSLRLSCAASGRTFSSYAMGWFRQAPGKEREFVAAITWSGGSTYYANSVKGRFTISRDNAKNTVDLQMNSLKPEDTAVYYCTPGEEVAGKYFRPLYDYWGQGTQVTVSS

SEQ ID NO: 480 - protein, 116 aa, synthetic construct
QVQLVESGGGLVQVGGSLRLSCSISRSIAIFNFMAWYREAEGKQRELVASITGGSRLSYIDSVKGRFTVSKDTANNTLDLQMNSLRPEDTAVYRCAASSPFAGEFWGQGTQVTVSS

SEQ ID NO: 481 - protein, 124 aa, synthetic construct
QVQLVESGGRLVQAGGSLRLSCAASGRTFNTMAWFRQAPGKEREFVAAITWSGGLTYYEDSVKGRFTIFRDNAKNLAYLQLNSLKPEDTAVYSCAARSTFRTALVNTVTAYDTWGQGTQVTVSS

SEQ ID NO: 482 - protein, 116 aa, synthetic construct
QVQLVESGGGLVQPGGSLRLSCTASGRTIASTIMGWYRQTPGKEREFVAISARSGDSESYASSVKDRFTISRDNAKNTVYLQMNNLKPEDTAIYYCYWNTGAGTIWGQGTQVTVSS

SEQ ID NO: 483 - DNA, 381 bp, synthetic construct
  source 1..381: mol_type = other DNA
gaggtgcaattggtcgagagcggtggcgggttggttcaaccaggtggttctttgcggctgtcatgtgcagcctctggctttgctctggacggatacacaatagggtggtttcgccaagctccgggtaaagagcgggagggagtggcatgtatcagtcgatctgatacttccacgaagtacgcagattcagttaaggggaggtttacgattagtcgagataacgccaaaagaactgtctctcttcaaatgaactctctcaagccggaggacacggcggtttattattgtgccgcctcacttcaatctggactgctttccagatttctcttgcctcgccagtatgaccactggggacagggtactcaggttactgttagcagc

SEQ ID NO: 484 - DNA, 381 bp, synthetic construct
  source 1..381: mol_type = other DNA
caacttcaactcgttgagtcaggaggggggctcgtccagcctggaggtagtctgcggctctcctgcgtagcttccggttttgcacttgactcatatactattgggtggttccggcaagcaccaggtaaagaacgggaggggctttcctgtatatccaggtcaacctccgatgctagatatgcggactctgttaaaggacggttcacgatatctcgggataatgcgaagactaccgtaagcctgttgatgagctccctcaaacccgaggacactgccgtctattattgcgctgccagtagacaaactggcctcctctccactttccttcttccgcgccagtacgatcactggggccagggaacgcaagtaactgtctccagc

SEQ ID NO: 485 - DNA, 381 bp, synthetic construct
  source 1..381: mol_type = other DNA
caagttcaactggttgaaagtggtggcggcttggttcagccgggcgggtcccttcgcctttcatgtgcagcgtcaggcttttcccttgacttttattcaatcggatggttcagacaagcccctggtaaagaaagggaaggagtctcttgtataacatggtcaggagagcgaacgaattacaaggatagcgtaaaaggtcgattcacaataagcagggacgatgctaaggcgacggtttttttgcagatgaataatctgaaaccggaagatacagcagtctactactgtgcagcggattctggctacccgtgttatgggtcctcctggtcctctgtaggctatgatttttggggccaggggacgcaagttacagtctcttca

SEQ ID NO: 486 - DNA, 357 bp, synthetic construct
  source 1..357: mol_type = other DNA
caggtgcaactcgttgaaagcggtggagggagtgtggaacccggcgggagcctcagattgagctgcgccacctctgggcttatcctcagtaatcacggcatggggtgggccagacaggttcccggcaaagaagttgaatgggtttccggaagctacaccgacggaagcacgtattatgcggatagtgttaagggccgctttaccattagccgggataatgtcaagaatacagtttatcttcaaatgaatagtcttaaacccgaagacactgccgtctactactgtgccgcaaggcaatattatcgctccggctatgtggactattgggggcaaggaacccaagtgacggtgtcatct

SEQ ID NO: 487 - DNA, 360 bp, synthetic construct
  source 1..360: mol_type = other DNA
caggtccaactggtagaaagcggcggaggcaaagtgcaacccggaggttcccttcggctttcatgtgccgcgagcggatttacgttttccaactacggtatgatgtgggtgagacaagctccaggcaaagggttggagtgggttagctatattgacagcggcggtggatccacctactacaccgactctgtacgagggaggtttacaattagtagagacaacgctaaaaacacagtctacctccaaatgaatagtctcaagccagaggacacagccgtgtactactgcgcaaaagcgataggtgttgtctctggctccttggaagtatggggacaagggacgctggtcacagtaagctct

SEQ ID NO: 488 - DNA, 363 bp, synthetic construct
  source 1..363: mol_type = other DNA
caggttcagcttgttgaaagcggaggaggactggttcaggcagggggcagcttgcgactctcatgcgccgccagcgggcggaccttcacaagttatgctatggggtggtttagacaagcaccgggaaaagagagagaattcgtagcagccatttcatggcggggcgtaaatacctattatgccgatagcgtgaaaggaaggtttaccattagcagagaaaacgcaaaaaatacggtgtacttgcaaatgatcagtctgaagccggaggatacagcggtgtattactgtgccgcaggtccattgggcgcgaccatgtctgagatcggttcttgggggcaggggacacaagtcaccgtgtcttcc

SEQ ID NO: 489 - DNA, 363 bp, synthetic construct
  source 1..363: mol_type = other DNA
gaggtgcagttggttgaatccgggggagggcttgtccaagctggaggttctctcagactcagttgtgcagctagtggacgcacctttagtaactatgctatgggatggttccgccaggctcctggtaaagaacgagagttcgtatcagcgatttcttggtccggtgggtccacctattacgcggacagcgtcaaaggtcgatttaccatttctcgagataatgcgaaaaataccgtctatctgcaaatgatatctctcaagcccgaggatactgctgtgtactattgcgcggctggtccgctcggagcaacaatgtcagaaattggaagttggggccaagggacgcaagttaccgtatcctct

SEQ ID NO: 490 - DNA, 363 bp, synthetic construct
  source 1..363: mol_type = other DNA
caagttcaattggtcgaaagtggaggcggcttggtacaagcgggtggatcactgagacttagctgcgctgcctcaggtaggaccgtgtcaagttatgctatgggctggttcaggcaggcgcctggcaaggaacgagaatttgtcgccgcaatttcatggtccggcggaggcacttactatgctgattccgtcaagggccggtttactatcagccgggataacgcaaaaaacacggtgtacctgcaaatgatttccctgaagcccgaagatacagcagtgtattattgtgcggcgggaccgcttggtgcgacgatgagtgagatcgggagctggggacagggcacacaagtaacggtgtccagc

SEQ ID NO: 491 - DNA, 363 bp, synthetic construct
  source 1..363: mol_type = other DNA
caagtccaacttgttgaatctgggggtgggctcgtgcaagctggggggagtcttcggttgtcatgcgccgcgtcaggacgcactgtatcaagctacgccatgggatggtttaggcaggcacctggtaaggagcgggagttcgtcgcggcgatttcctggtcaggtggaagcacgtactacgcagactcagtgaaaggtagattcacgatctcacgggataatgccaaaaataccgtctacctccagatgatctctcttaaacctgaagatacagccgtgtactattgcgccgctgggccactcggtgctacgatgagtgaaattgggagttggggccagggcacgcaggtcactgtttcaagc

SEQ ID NO: 492 - DNA, 372 bp, synthetic construct
  source 1..372: mol_type = other DNA
gaagttcagttggtagaatctggcggtggcctggctcaacctgggggatcactcagactcagttgtgtagcgtccggctttgccttcggctccttcgctatagattgggtgcgacaaccgcccggaaagggacctgaatgggtatctgcgatcaaccggggaggggatcgcacatactatagtgatagcgtaaagggtcgatttacaatctcccgcgataacgccaagaatacactctatctgcaattgaacagtcttaaaccggaggacacggcggtttatctgtgtgctgctggagggcgcgtgtctgctgatggaaaaaagtgggagtacgactattggggtcagggcacgcaagtgaccgtatcttcc

SEQ ID NO: 493 - DNA, 372 bp, synthetic construct
  source 1..372: mol_type = other DNA
gaggtgcaacttgtcgagagcggaggaggtcttgttcatgcgggaggttctctgcgcctgagctgcgccgcgagcggacggacattcaataccatggcttggttccggcaggcgcctggcaaggagagagaattcgtagccgccatagcatggaattcaggtcttacctactatggggacagtgtaaaggggcgcttcaccatctttcgagacaatgcgaagaatctggcctacctccagatgaactccttgaaacctgaggatactgcggtctattcctgcgctgcacgacggacgttccgcaccggactgatcaacactgtcaccgcgtatgatacatggggtcaggggacacaagtcaccgtctcatca

SEQ ID NO: 494 - DNA, 372 bp, synthetic construct
  source 1..372: mol_type = other DNA
gaagtacaacttgtcgagagcggcggcgggctcgtacatgctggcggctcattgcgccttagctgcgtagcaagcgggaggacttttaacactatggcctggtttagacaagctcctggtaaagaaagagaatttgtcgcggcaatttcctggagcggagggctcacgtactacggggatagcgttaaggggcgattcacgatattcagagacaacgctaaaaacctggcctaccttcaaatgaatagcttgaaaccagaagacactgccgtatattcatgtgcagcccgccggacgttccggacagccctcatcaacactatcacagcctatgatacctggggtcaaggaactcaagtgactgtcagctcc

SEQ ID NO: 495 - DNA, 348 bp, synthetic construct
  source 1..348: mol_type = other DNA
gaagttcaactcgtcgagtcaggtggtggccttgtccaagccgggggaagcctccgattgtcttgcgctgcaagtgggaatattgttgatatagacgacatgggatggtaccggcaggcacctggacgcgacttggtcgcttctataacggctggcgggattacaaagtacgctgattcagcgaagggcaggttcactatctcccgcgataacgttaaaaacaccgtgtatctgcaaatgaacagtcttaaacctgaagatacggcgacgtactactgttatgcagtgagacggtactaccctcgatttgattattggggccagggcacacaagtgacagtgtccagt

SEQ ID NO: 496 - DNA, 354 bp, synthetic construct
  source 1..354: mol_type = other DNA
gaggttcaacttgtggaaagtggcggggggctcgtgcaagcgggtgggagcctccggctgtcttgcgcagccagcgggaacatcgttgaaatcgacgacatggggtggtatagacaagcaccaggaaaacagcgggaccttgttgccacaattacagctggaggcattacgaattatgcatcttcagctaaagggaggtttacgatctcccgagataacgtaaagaacacagtctatttgcaaatgaactccctgaaaccggaggataccgcaacgtactactgctatgccatacgaaagtattacccacgattcgattattggggtcaaggcactcaggtgaccgtgtcaagt

SEQ ID NO: 497 - DNA, 363 bp, synthetic construct
  source 1..363: mol_type = other DNA
gaggttcaactcgttgaaagtggaggagggctcgtccaggcgggcgggagtctgaggctttcttgcgccgcgagcggtagaactttccgatcctatgctatgggctggttcagacaggctcccggaaaagagagagaatttgtggcggccatatcttggtccggtgggcggatatactatgcagacagcgtcaaggggagattcacgataagccgagataatgcaaagaatacggtatacctgcagatgaactcccttaaacccgaggacaccgcagtatattattgtgccgctgatgattttgagaggaccatgacggaagtacggtattgggggcagggcactcaagtcaccgtgtcttca

SEQ ID NO: 498 - DNA, 366 bp, synthetic construct
  source 1..366: mol_type = other DNA
gaggtgcaactggttgagagtggcgggggtcttgtccagccagggggatcacttaggctgtcatgtgcggctagcggctttaccttcagcgggtattacatgagttgggtccgccaggctccaggaaagggacttgagtgggtaagtagtatatatagcgatgattcaaacacttattatgcggattcagttaagggtagatttacgattagcagagataatgcaaagaacactgtctatctccaaatgaacagccttaaaccagaggacactgcagtttactattgtgcagcaagcgcgacacttagaggccgcgataccaggttcgattactggggccagggaacacaagtcactgtcagctcc

SEQ ID NO: 499 - DNA, 372 bp, synthetic construct
  source 1..372: mol_type = other DNA
gaggttcaactcgtcgaatccggagggggattggtgcaacccggcggatcacttaggctttcctgtagtgcatctggcttccctttcgacgattacagtatggactgggtcaggcaggcaccggggaaaggcttggaatgggtgagtgccatcaacaggaacgggggatcaacgtattacgccgagtccatgaaggggaggttcacgatcagccgggataatgccaaaaacacgctgtatctccagatgtccagtcttaaaccagaagataccggggtctatctctgtgctgcggggggcagggtgtccgcagatggtaagaaatgggaatatgattattggggtcaggggacccaagttacggtttctagc

SEQ ID NO: 500 - DNA, 339 bp, synthetic construct
  source 1..339: mol_type = other DNA
caactccagctggtcgagtctggaggtggtttggtccaggctggggggagccttcgcctgtcatgcgctgcgagtgaccccatcgttaccttcaacactatgggatggtatagacaagcgcctggcaagcagagagaacttgttgcgagaattaccatgtctggcattcccaactacgcggattccgtaaaagggcggtttaccatatcccgagataacgcgaaaaatacgctgtatcttcaaatgaactctttgaagcccgaggatagtgccgtttactattgtcgagctgagcattctggctattgggggcagggaactcaggttactgtaagcagc

SEQ ID NO: 501 - DNA, 354 bp, synthetic construct
  source 1..354: mol_type = other DNA
caactccaacttgttgagtctgggggcggcttggttcaagctggtggctccttgcgactctcttgcgccgctagcgggaacattgttgatatagacgacatgggatggtatcgccaggcaccgggaaaacagcgcgatctggtcgccaccatcacggcgggtgggattgccaactatgccgattcagcgaaagggaggtttacgataagccgcgacaacgctaagaacacagtgtacctgcaaatgaactctctcaaaccagaggacactgcaacatattactgttacgcaatccggcggtactaccctagattcgattattgggggcaaggagcccaagttacagtatcctcc

SEQ ID NO: 502 - DNA, 366 bp, synthetic construct
  source 1..366: mol_type = other DNA
cagcttcagcttgtggaaagcggagggggcctggtgcaagcaggtggcagtcttcgactctcatgtgcggcgtcaggacggactgtcagttcatacgccatgggctggttcaggcaggcaccgggcaaagaaagggagtttgtcgcggccattagttggtctggggggagcacttactatgccgatagtgttaagggtagatttactattagtcgcgataacgctaagaacaccgtttatttgcagatgaactcacttaaaccagaggatacagcagtgtactattgcgctgccgaccccagcctgagtcgcaccatggacgagataggctcctggggtcaaggaacgcaggtcacggtttcctct

SEQ ID NO: 503 - DNA, 354 bp, synthetic construct
  source 1..354: mol_type = other DNA
caactccaacttgtggaatcaggagggggtctcgtacagacaggaggatcactcaacttgagttgtgccgcctctggagcttttgtgtctatagatgccatggcgtggtatcgacaggctcccggcaaggctcgggagcttgtcgccttttcaagcagcggtgggataacaaattatgcggacagtgtcaagggccgatttaccattactagggataacgcgaaaaatactgtttatctccaaatgaattcccttaaaccagaggatacggctgtgtactattgcaacgcagacatcttgcaatcaggttggtacacgtactggggacaaggaactcaggtgacagtgtctagc

SEQ ID NO: 504 - DNA, 369 bp, synthetic construct
  source 1..369: mol_type = other DNA
cagttgcaacttgtggagagcggtggaggcctggttcgggcaggaggtagtctccggttgtcttgtgtattgtcagggaggacattttccagttacgcgatgggatggttcaggcaggctcctgggaaagaacgagaattcgtttcaactatttctctgtccggcggatcaaccttctatagcgattccgccaagggtcgctttaccataagtcgggacaacgccaaaaacaccgtttatctgcaaatgaatagtctgaagccagaggacgcggcggtgtactactgtgctgcacggcccgtgttgattagtcgcagttccacggactacgcttattgggggcctggaacccaggtgaccgtcagctct

SEQ ID NO: 505 - DNA, 369 bp, synthetic construct
  source 1..369: mol_type = other DNA
cagcttcagctcgttgaatctgggggaggcctggttcgcgctggaggcagccttcgcctctcctgcgtgctttcaggacgaactttttcaagctatgcgatgggttggtttaggcaggcgcctggaaaagagcgggaatttgtcagtacgataagccttagcgggggtagtacattttactcagatagcgcgaaaggccgatttactatatcccgagataatgcgaaaaatacggtctatttgcagatgaatagtctgaaaccagaggatactgccgtctattactgcgctgcgaggcccgtacttatttcccggagctccatagactatgcttactggggtccgggcacacaggtaacggtctccagt

SEQ ID NO: 506 - DNA, 372 bp, synthetic construct
  source 1..372: mol_type = other DNA
caggtccaacttcaggaaagcggtgggggtttggtacaggcaggagaaacgctgggacttagttgcgtacacagtggacgcgcgttctcaggccatggtatggggtggtttcgccaggcccctggaaaagaaagggagtttgtggcggctataagttggtcaggcgtctcaactgcctatgccgactctgtaaaaggtcgattcaccatctctagagtgaacgctgacaacacggtgtcacttcaaatgaatagtctgaaacccgaggacacagccgtttacttctgcgcggcgggcctctactctcgaccaaccactgaacgcagggaatacatatactggggtcagggaactcaggtaacagttagcagc

SEQ ID NO: 507 - DNA, 354 bp, synthetic construct
  source 1..354: mol_type = other DNA
caagtacagctgcaagagagtgggggcgggctcgtccaagccgggggatctttgcggctcagttgcgcggcctctggtaattccgttgacattgacgacatgggatggtaccgacaggctcctggcaagcaacgagatttggtcgcgactatcaccgcaggaggcatcaccaagtatggtgactctgcgaaaggcaggttcacaataagcagagataacgtgaagaataccgtgtacttgcagatgaatagcctgaagcctgaggacaccgcaacctactactgttatgccgtccggcgctattacccacgcttcgactattggggccagggtacgcaagtaacagtaagtagt

SEQ ID NO: 508 - DNA, 363 bp, synthetic construct
  source 1..363: mol_type = other DNA
caggttcagttgcaagaaagcgggggaggcctcgttcagccgggtggctcattgaggttgtcatgcgccgcttcaggttctatattctctatgaacgcgatgggatggtatagacaagcccccggcaaacaacgcgaacttgtggcgactattacagataatgactttacttactatgcagcctccgtgaaagatcggtttacaatttctcgggggaacgccaagaacactgtgtatcttcagatgaacagtctgacgcctgaagatacggcggtctactattgcaatgcggatggcatctactccggtggaagatattacccatcttcatggggacagggtacacaagtcacagtaagcagc

SEQ ID NO: 509 - DNA, 387 bp, synthetic construct
  source 1..387: mol_type = other DNA
caggtacagcttcaggaatctggcggtggcctggtccagccaggaggaagcctgagattgagctgtgcggcatccggcagcattttttctgtaaatgatatgggctggtacagacaggctccagggaagcaacgcgaattggtggcggcctcatactctggtgggtcaacgaattatgccgatagtgttaagggacggtttacgattagcagggataatgcaaaaaacactgtgtatttgcaaatgaattctcttctccccgaagatacagctgtgtattattgtaatgccgatttggtcgtagttacgactacgccgcctagtttccccatgccgtaccgattccttgaggtgtggggtcagggtacgctggttaccgtcagcagc

SEQ ID NO: 510 - DNA, 372 bp, synthetic construct
  source 1..372: mol_type = other DNA
caagtacaacttgtagaatctggagggggtctcgtacacgcgggcggttctctccgcctttcttgcgctgccagtggaaggacattcaacacgatggcatggttccgccaagcaccaggaaaagagcgagaatttgtcgcggctatatcatggtccggaggtctcacttattacgcggactccgtgaaggggcgattcaccatttttcgggacaatgcgaagggtctggcctacctccaaatggattcattgaagccagaagatacggcagtgtactcatgcgccgcgagaaggaccttcagaacagcgctgattaacactgtaacggcttacgacacctggggccagggaactcaggtcactgtctcaagt

SEQ ID NO: 511 - DNA, 372 bp, synthetic construct
  source 1..372: mol_type = other DNA
caagttcaactggttgaatccgggggcgggctggtgcatgcgggcggttctcttcgactctcttgcgccgcctcaggtagaaccttcaatacgatggcttggtttcggcaagcaccgggtaaggagcgggagttcgtggcggcaattagctggtcaggtggactgacctattacggagattctgtgaagggccgcttcactatattccgggacaatgcgaagaatctggcgtatcttcaaatgaactcactgaagcccgaggacactgctgtgtactcctgcgctgctcgaaggactttcaggacgggacttatagatacggttacagcgtacgatacttgggggcagggaacccaggttacggtttctagc

SEQ ID NO: 512 - DNA, 354 bp, synthetic construct
  source 1..354: mol_type = other DNA
caggtccagcttgtggaatccggcggcgggttggtgcaagccggtgatagcctgcgcctttcttgcgcggctgctagtgggcgcgctttgagcggctggcaaatgggttggtatcggcaggcgccggggaaggaaagagagtttgttgcatccatttccatgtccgatgggagtactagctaccaagattctgtcaaggggagatttacgatcagccgcgacaatgcacttagtacaatgtctttgagaatgaacagtcttaaatccgaggacactgctatttactactgccaggggcggtctaggttcgggtttgagtattggggtcaaggcactcaagtcacagtctctagt

SEQ ID NO: 513 - DNA, 378 bp, synthetic construct
  source 1..378: mol_type = other DNA
caggtacaactcgtagaaagcggtgggggccttgttcaggcaggggagagcctccggttgtcttgcgtcgctagcggtcgagccttgtcaggacacggtatggggtggttccgacaagcgccagggaaggaaagagagttcgtagctgctatcagttggagtggggtgtcaactgcttacgcagactccgtaaaaggtcgcttcacgatcagtagggttaatgcggaaaacacagtgtctgtatccttgcagatgaactcactgaagccagatgatacagcagtctatttctgcgccgctgggttgtattcccgcccgacaacggagcgacgcgactacatatactggggacagggaacacaggttaccgtgagcagc

SEQ ID NO: 514 - DNA, 357 bp, synthetic construct
  source 1..357: mol_type = other DNA
caggtgcaactggtagaaagtggcgggggcctggtacaagcgggaggcagcttgcggctctcttgcgcggcggcgtcccacacgttcgattcttatacgatgggttggttccgacaggctccgggaaaagaaagggagttcgtggctgctgtgaattgggataatgtgaagaactacgcagatccggttaaagggcggttcacaatctctcgagacaatgtgaaaaaccgcgtgtatttgcagatgaatagcttgaaacccgaagatacggcagtctactattgtgcggcaggtaccaatctgccgacgagaggaagcggatcttgggggcagggtacacaagttactgtctcaagt

SEQ ID NO: 515 - DNA, 357 bp, synthetic construct
  source 1..357: mol_type = other DNA
caagtccaactcgtcgagtcaggaggtgggctcgttcaggcaggcgggagcctgaggttgagttgtgccgccgcaagtcttacctttgattcatatactatgggatggtttagacaggcgccaggtaaagaaagagagttcgtagcagcagttaactgggacaacgtaaagaattatgcagatccagtaaagggtcgctttaccatctcaagagataatgtcaaaaatacggtgtacctccaaatgaacagtctgaagcctgaggatacagccgtatactattgcgccgccgggaccaacctccccactatagagtcagggagttgggggcagggcactcaagtaactgtgagtagt

SEQ ID NO: 516 - DNA, 354 bp, synthetic construct
  source 1..354: mol_type = other DNA
caagtacaacttgttgagagcgggggaggattggtgcaggccggaggttccctccggctgtcctgcgctgcgtcaggaaatggggtagatatagacgacatgggttggtacagacaggcacccggcaaacaaagggacctggtagcatctattactgctggaggaattactaaatacgccgattctgcaaaaggacggtttacgatcagtcgggacaacgtaaagaacactgtttacctccagatgaattccctgaagccggaggacacagcgacttactattgttacgctatcagacgattctaccctcgcttcgactactggggccagggtacgcaggttacggtttcatct

SEQ ID NO: 517 - DNA, 354 bp, synthetic construct
  source 1..354: mol_type = other DNA
caggtacagctcgtcgaatccgggggaggcttggtccaggcgggcggaagtcttagattgtcttgtgccgcatctgggaacggcgttgatattgacgatatggggtggtatcgacaggcgcccggtaagcagcgcgatctggttgccagcatcacggcaggaggaatcactaattatgcggatagtgccaaaggaaggtttaccatctctcgggacaacgtcaaaaatacagtatatcttcagatgaactcccttaaaccagaggatactgcgacctattattgctacgcaatacgccggttttaccctcggtttgactactggggtcaagggacgcaggtgacagtatcatca

SEQ ID NO: 518 - DNA, 354 bp, synthetic construct
  source 1..354: mol_type = other DNA
caggttcaactggtcgagtccggtggaggcttggtgcaagcgggtggtagtctgcggctgagctgcgctgctagtggtaacggtgtcgacatcgacgacatgggatggtacagacaggcaccagggaagcagagggaccttgttgctacaatcacagccggcgggataaccaaatacgcagattctgcaaagggtcggtttacaatttcacgagataatgtaaagaataccgtctatttgcagatgaacagccttaaacccgaagatactgccacatattattgttacgccataaggcgattctatccccgcttcgactattggggtcaggggactcaagttactgttagctcc

SEQ ID NO: 519 - DNA, 354 bp, synthetic construct
  source 1..354: mol_type = other DNA
caggtgcaactcgttgaaagcgggggaggactcgtgcaagcgggaggatcactccgactgagttgtgctgcttcagggaatggcgttgatatagacgacatgggttggtatcgacaggcacccggaaagcaacgggatttggtcgcgactattacagcggggggtattactaactatgcggatagcgccaaggggcgattcactatctcacgcgataacgtgaaaaacaccgtatatcttcagatgaacagtttgaaaccagaagacaccggtacatactattgttacgctatcagaaaattttaccccagatttgattactgggggcagggaacgcaggttacggtcagtagc

SEQ ID NO: 520 - DNA, 354 bp, synthetic construct
  source 1..354: mol_type = other DNA
caggtccagctggttgaaagcggtggggggctggtccaagccggcggttctcttagacttagctgcgccgcgtctggtaacattgttgacatcgacgacatggggtggtataggcaggctccaggtaaacaacgagatttggttgcctcaatcacagcggggggtataaccaaatatgcagattcagctaagggacgattcaccattagccgagacaatgtaaagaacactgttagtttgcagatgaactcactgaaacctgaagatacggcgacatattattgttatgcagttagaaagtattaccccagatttgactattggggccaaggcactcaagtgaccgtatcctct

SEQ ID NO: 521 - DNA, 354 bp, synthetic construct
  source 1..354: mol_type = other DNA
caggtccagttggtggagagcggcggtgggttggttcaggcgggagggtctctcaggctgagctgtgctgcaagtgggaatatcgtcgacatcgacgatatgggttggtaccgccaagcacctgggaagcaacgagatttggttgcatctataaccgcaggcagaataaccaaatatgctgatagcgcgaaaggaaggtttacaatatctagggataatgttaaaaataccgtttatctccagatgaactcactgaagccagaagataccgcgacttattactgttacgcaataaggcggtcatacccaaggttcgactactggggacaggggacacaggtcacagtgtcaagc

SEQ ID NO: 522 - DNA, 357 bp, synthetic construct
  source 1..357: mol_type = other DNA
caggtacaacttgtcgaatcaggtggaggactcgtgcaggctggggggtccctgcgcttgagttgcgccgctagtggtaggacattttccaattacgccatgggttggtttagacaagctcctgggaaggagcgcgaattcgtggctgcaattaactggtccggcggacgcatttactatacagactccgtgaaaggtcgatttacaatcagtagagacaacgccaagaatacggtttatcttcagatgaacagtcttaaaccggaagatactgccgtgtactattgcgctgcggggacgaattggtcaataccacctgattactggggtcaggggacgcaggtaaccgtgagctcc

SEQ ID NO: 523 - DNA, 369 bp, synthetic construct
  source 1..369: mol_type = other DNA
caagtacagctcgtggagtcaggtggtggactcgttcaggcgggtggttcccttaggttgtcctgtgctgcgtcaggtcgcacgttcagctcctatgctatgggctggttcaggcaggcaccggggaaggagcgagaatttgtagcggcaatacgatggagtggaggctctacttattacggagatagtgttaaagggaggttcactatttctagagataatgcgaaaaacaccgtgtatctccaaatgaacagcctcaaacctgaagatacggcagtctactactgtgcggctgaccccattggcctcggatacgaaatgggagagtatgattactggggtcaaggtacgcaggttactgtatcaagt

SEQ ID NO: 524 - DNA, 366 bp, synthetic construct
  source 1..366: mol_type = other DNA
caggtacagcttgtcgaaagcgggggcggtctggttcaggccggtggaagtttgaggctcagttgtgcagcgagcgggagaaccttctccagttacgcgatggggtggttccgacaggcgccagggaaggagagagaattcgtggcagcaatctcatggtccggcggaagcatttattatgcggactctgtaaaggggcgatttacaatatcccgagacaacgcgaagaacacagtatccctccaaatgaatagcctgaagcctgaagacacggctgtgtactattgtgccgcagacggaacgctccgcacgcccatgaaccttattcattattgggggcagggaacccaagtgactgtatcttct

SEQ ID NO: 525 - DNA, 372 bp, synthetic construct
  source 1..372: mol_type = other DNA
caagtccaactggtagagagtggcggtgggctcgtccaagccgggggctctctcaggttgtcctgtgccgcgtccggcaggaccttctcaagttatgcgatgggatggttccgacaggcaccaggaaaagagagggagtttgtcgcagctatttcatggtctggcggtagcacgtattatgccaatagcgtgaaagggcggttcacgattagtcgggacaatgcgaaaaacaccgtttatctgcaaatgaattccctgaagcctgaggacaccgctgtgtactactgcgctcctggcgaagaagtagcaggcaagtatttccgccaactctatgactactgggggcagggcacacaagttacagtgagttcc

SEQ ID NO: 526 - DNA, 372 bp, synthetic construct
  source 1..372: mol_type = other DNA
caagttcaacttgttgagtccgggggtggcctcgtccaagcaggagggtccctccggctgtcatgcgcggctagcggtcggacatttagcagttatgcgatggggtggttccggcaagcaccaggtaaggaaagggagtttgtggcagacatttcatggagtggaggtacgacaaattatgcaaacagcgttaaggggcgctttacgatttcccgagacaatgcaaaaaacacagtatatctgcagatgaactcactcaagccggaagatacggcggtttactactgtgcgcctggagaagaagtggacggcaaatatttccgccctctctatgattactgggggcagggaactcaggtaaccgtaagcagt

SEQ ID NO: 527 - DNA, 372 bp, synthetic construct
  source 1..372: mol_type = other DNA
caggtacaactggtggaatcaggtggggggttggtccaggctggaggatcattgcgactcagttgcgccgcatcagggcgaactttttctacctatacgatgggatggtttcggcaagcccccggtaaagaacgacagtttgtcgcagccattagttcctcaggagactcaacctactacactgattccgtgaaaggccggtttaccatttccagagataatgccaagaacactgtttatctgcagatggacagcctgaagcccgaggacacagcggtgtattactgcgcaccgggtgaagaagtagctggaaaatacttccgcgcactgtatgattactggggccagggcactcaagttaccgtctctagt

SEQ ID NO: 528 - DNA, 372 bp, synthetic construct
  source 1..372: mol_type = other DNA
caagtccagcttgtagaaagcggtggcggtctcgttcaagccggtggaagcctccggctttcatgtgcggcatcaggttcaattttctccattaacgcgatggcatggtataggcaagcccctggtaagcagcgcgagctcgtggctgttatcacatcaggagggagtactaactacgcggattctgttaaaggaagatttaccatttcccgcgataatgctaagaatacagtctacctccaaatgaactccctgaagcctgaagacactgccgtgtattattgcaatgctgatctggtctactactcaggcaatcctggagactatggtatggactactggggaaaggggacattggtgactgtcagtagt

SEQ ID NO: 529 - DNA, 345 bp, synthetic construct
  source 1..345: mol_type = other DNA
caggttcagttggtagaatccggcggtggattggtgcaggctggagggtccttgagactttcctgtgttgcgagcgggaggacgttttcaatcaataacattaactggtatagacaggcccctggcaaggagcgagagttcgttgccactaccagatggcggggagacagcacttactacgctgactctgtggccggtcgatttaccatatcaagagactcagctaaaaataccgtgtacctccaaatgaactcactgaaaccagaggatactgctatatactattgcaatgctaagggcggcgttgatgtctggggtcaaggaacccaggtaacggtttccagt

SEQ ID NO: 530 - DNA, 348 bp, synthetic construct
  source 1..348: mol_type = other DNA
caggtacagcttgttgagtccggcgggggtctcgtacagccgggcggctccttgcgcctcagttgtgcggcgagtggattcttgttctcactctacgctatggcatgggtccggcaagccccaggcaaaggtctggagtgggtaagtgatataagcaacggaggtgttaccacaagatacgcggattcagtaaaaggccggtttacaatttcacgagataatgcgaaaaatacgttgtatcttcaaatggatagtctgacgccgggggatactgcggtctattactgtgctgttacaaccacgggctggcgggcaagaggccaagggacccaagtgactgtctcctcc

SEQ ID NO: 531 - DNA, 351 bp, synthetic construct
  source 1..351: mol_type = other DNA
caggtccaacttgttgaatcaggcggaggactcgttcagcctggaggcagcctgaggctttcttgcgccgcttcaggaagcatattcagaccaaacgacatgggctggtaccgacaggcgcccggtaaacaaagggaactcgtggcaatcataacggacgggggtatcacaaattacgctgcaacggtaaaggggaggtttacgattagtcgagacaatgccaaaaatacagtgtaccttcaaatgaacagcctcaaaccggaggacacggcggtttattattgcaaccttaatatcccgtaccctcgcgtttcctcatggggccagggaacgcaggtcacagtctcatct

SEQ ID NO: 532 - DNA, 372 bp, synthetic construct
  source 1..372: mol_type = other DNA
caggtgcagctcgtcgagtctgggggaggccttgtccagcctggtggctcccttcgcctgagttgtgcagcatctgggagtacatttaacaccatggcctggttccggcaagcgccgggaaaggagcgcgaattcgtggcggccatatcatggagcggcggattgacctattatggtgattccgtcaagggaagattcaccatattcagggataacgcgaagaatttgggctatctccagatgaattcccttaaaccggaagatactgcggtatatagttgcgccgcgaggacaactttccgaaccggtttgatcgtaaccgtaacagcctatgatacatggggtcaaggtacacaagtgacagtcagttcc

SEQ ID NO: 533 - DNA, 369 bp, synthetic construct
  source 1..369: mol_type = other DNA
caggtgcagttggtagagtccggaggaggtctcgtgcagcccggaggttcactcagactttcatgtgtgttgagtgggcggacgttttctagttatgcaatgggatggttccggcaagcgccgggcaaagaaagagagttcgtgagtacaatctccttgtccgggggaagcacattttactcagggagtgcgaaagggcggttcacgataagtagagataacgccaaaaacaccgtttatctccagatgaactccttgaagcctgaagacactgcggtgtactactgcgctgcacgacctgttcttattagccggagctcaacagactacgcctattggggtccgggaactcaagttacagttagctca

SEQ ID NO: 534 - DNA, 369 bp, synthetic construct
  source 1..369: mol_type = other DNA
caggttcaactcgttgagtccggcggcggccttgtccaacctggtgggagtttgcggttgtcctgtgtacttagcggcagaacctttagctcatacgcgatgggatggtttcgccaagcgccgggtaaagagcgagagttcgtatcaactatcagcttgtctggcggatcaacgttctatagcggttctgccaaaggacggttcaccatttcaagagacaatgcgaaaaacactgtatatctgcagatgaatagtctcaaacctgaggacactgccgtctactattgtgctgctcggccagttttgataagccgaagtagcaccgattatgcctactggggacctggtactcaggtgaccgtttccagt

SEQ ID NO: 535 - DNA, 372 bp, synthetic construct
  source 1..372: mol_type = other DNA
caggtgcaactcgtagaaagcgggggtgggttggttcaaaccggtggctcattgcgattgtcctgcgcggcatctggaagaacgtttagttcttatgcgatgggttggtttaggcaggctcctggaaaggaacgggaatttgtcgccgcaatcacctggtcaggtggatccacctattacgcaaacagtgtaaaggggcgctttacaatctctcgggacaacgctaaaaatacagtggatttgcaaatgaacagtctcaagcccgaggacacagcagtctattattgcactcctggagaagaagtagccggtaagtattttagacctctgtatgattattgggggcaagggacgcaagttaccgtttcatca

SEQ ID NO: 536 - DNA, 348 bp, synthetic construct
  source 1..348: mol_type = other DNA
caggttcagttggttgaatctggaggtggtctcgtacaggtcggcgggtcattgcggctgtcctgctctattagcaggagcattgcaatttttaattttatggcctggtatagggaggccgaagggaagcagcgggaactcgtcgcctccatcactggcgggagtcgactgtcatatattgatagtgttaagggacgcttcacggtcagtaaggacacagctaacaatacactcgatctccaaatgaactccctgcgaccagaggacaccgccgtgtatcgatgcgcggcgtctagtccgtttgctggtgagttctggggccaagggacccaggtaactgtgtcttca

SEQ ID NO: 537 - DNA, 372 bp, synthetic construct
  source 1..372: mol_type = other DNA
caggtgcagctggtggaatcagggggacgcttggttcaagcagggggtagccttaggttgtcttgtgcggcaagtgggcggacgtttaatacaatggcctggtttcgacaggcacctggaaaggaaagggaatttgtagctgccatcacctggtccggggggttgacatactacgaggatagcgtaaaagggaggtttacaatttttcgagacaacgcaaaaaatttggcataccttcagctcaactcattgaaacccgaggatacagctgtatattcttgtgccgcccgatcaacttttaggactgccctggttaatactgttacggcgtatgacacttggggacaaggcacccaagtgacggtaagctca

SEQ ID NO: 538 - DNA, 348 bp, synthetic construct
  source 1..348: mol_type = other DNA
caggtgcaactggttgagtccggcggtggcttggtacagcccggcggcagtctccgacttagttgtacggcgtcaggtcgcacaattgcgagcacgattatgggctggtacagacaaacgcccggcaaagaacgggaatttgtcgctatcagcgctaggagcggcgattccgaatcctatgcaagttcagtgaaggataggtttaccatcagtcgcgataatgcgaaaaataccgtctacctccagatgaacaatttgaaacctgaggacactgctatatattactgctactggaatacgggagcaggaaccatctgggggcagggaacacaagtgactgtctcttcc

SEQ ID NO: 539 - protein, 25 aa, synthetic construct
  VARIANT 5: note = X is Q or V
  VARIANT 11: note = X is L or S
  VARIANT 14: note = X is A or P
QVQLXESGGGXVQXGGSLRLSCAAS

SEQ ID NO: 540 - protein, 14 aa, synthetic construct
  VARIANT 2: note = X is F, Y, or V
  VARIANT 9: note = X is E, C, or G
  VARIANT 10: note = X is R or L
  VARIANT 12: note = X is F, G, L, or W
  VARIANT 14: note = X is A, S, or T
WXRQAPGKXXEXVX

SEQ ID NO: 541 - protein, 37 aa, synthetic construct
  VARIANT 2: note = X is A, Q, T, or V
  VARIANT 3: note = X is D or E
  VARIANT 5: note = X is V or A
  VARIANT 10: note = X is T or A
  VARIANT 11: note = X is I or V
  VARIANT 13: note = X is R or Q
  TRANSIT 15: note = X is N or K
  VARIANT 17: note = X is K or A
  VARIANT 20: note = X is V, L, or M
  VARIANT 25: note = X is N or D
  VARIANT 26: note = X is S or N
  VARIANT 28: note = X is K or R
  VARIANT 30: note = X is E or D
  VARIANT 33: note = X is A or G
  VARIANT 34: note = X is V, I, T, or M
YXXSXKGRFXXSXDXAXNTXYLQMXXLXPXDTXXYYC

SEQ ID NO: 542 - protein, 11 aa, synthetic construct
WGQGTQVTVSS

SEQ ID NO: 543 - protein, 5 aa, synthetic construct
FYSIG

SEQ ID NO: 544 - protein, 5 aa, synthetic construct
GYTIG

SEQ ID NO: 545 - protein, 5 aa, synthetic construct
SYTIG

SEQ ID NO: 546 - protein, 5 aa, synthetic construct
FNFMA

SEQ ID NO: 547 - protein, 5 aa, synthetic construct
FNTMG

SEQ ID NO: 548 - protein, 5 aa, synthetic construct
IDDMG

SEQ ID NO: 549 - protein, 5 aa, synthetic construct
IDAMA

SEQ ID NO: 550 - protein, 5 aa, synthetic construct
MNAMG

SEQ ID NO: 551 - protein, 5 aa, synthetic construct
INAMA

SEQ ID NO: 552 - protein, 5 aa, synthetic construct
PNDMG

SEQ ID NO: 553 - protein, 5 aa, synthetic construct
VNDMG

SEQ ID NO: 554 - protein, 5 aa, synthetic construct
GWQMG

SEQ ID NO: 555 - protein, 17 aa, synthetic construct
CITWSGERTNYKDSVKG

SEQ ID NO: 556 - protein, 17 aa, synthetic construct
CISRSDTSTKYADSVKG

SEQ ID NO: 557 - protein, 17 aa, synthetic construct
CISRSTSDARYADSVKG

SEQ ID NO: 558 - protein, 16 aa, synthetic construct
SITGGSRLSYIDSVKG

SEQ ID NO: 559 - protein, 16 aa, synthetic construct
RITMSGIPNYADSVKG

SEQ ID NO: 560 - protein, 16 aa, synthetic construct
TITAGGIANYADSAKG

SEQ ID NO: 561 - protein, 16 aa, synthetic construct
SITAGGITKYADSAKG

SEQ ID NO: 562 - protein, 16 aa, synthetic construct
TITAGGITNYASSAKG

SEQ ID NO: 563 - protein, 16 aa, synthetic construct
TITAGGITKYGDSAKG

SEQ ID NO: 564 - protein, 16 aa, synthetic construct
SITAGRITKYADSAKG

SEQ ID NO: 565 - protein, 16 aa, synthetic construct
TITAGGITNYADSAKG

SEQ ID NO: 566 - protein, 16 aa, synthetic construct
TITAGGITKYADSAKG

SEQ ID NO: 567 - protein, 16 aa, synthetic construct
SITAGGITNYADSAKG

SEQ ID NO: 568 - protein, 16 aa, synthetic construct
FSSSGGITNYADSVKG

SEQ ID NO: 569 - protein, 16 aa, synthetic construct
TITDNDFTYYAASVKD

SEQ ID NO: 570 - protein, 16 aa, synthetic construct
VITSGGSTNYADSVKG

SEQ ID NO: 571 - protein, 16 aa, synthetic construct
IITDGGITNYAATVKG

SEQ ID NO: 572 - protein, 16 aa, synthetic construct
ASYSGGSTNYADSVKG

SEQ ID NO: 573 - protein, 16 aa, synthetic construct
AIYSGGSTNYADSVKG

SEQ ID NO: 574 - protein, 17 aa, synthetic construct
SISMSDGSTSYQDSVKG

SEQ ID NO: 575 - protein, 18 aa, synthetic construct
DSGYPCYGSSWSSVGYDF

SEQ ID NO: 576 - protein, 18 aa, synthetic construct
SLQSGLLSRFLLPRQYDH

SEQ ID NO: 577 - protein, 18 aa, synthetic construct
SRQTGLLSTFLLPRQYDH

SEQ ID NO: 578 - protein, 8 aa, synthetic construct
SSPFAGEF

SEQ ID NO: 579 - protein, 5 aa, synthetic construct
EHSGY

SEQ ID NO: 580 - protein, 10 aa, synthetic construct
IRRYYPRFDY

SEQ ID NO: 581 - protein, 10 aa, synthetic construct
VRRYYPRFDY

SEQ ID NO: 582 - protein, 10 aa, synthetic construct
IRKYYPRFDY

SEQ ID NO: 583 - protein, 10 aa, synthetic construct
VRKYYPRFDY

SEQ ID NO: 584 - protein, 10 aa, synthetic construct
IRRSYPRFDY

SEQ ID NO: 585 - protein, 10 aa, synthetic construct
IRKFYPRFDY

SEQ ID NO: 586 - protein, 10 aa, synthetic construct
IRRFYPRFDY

SEQ ID NO: 587 - protein, 10 aa, synthetic construct
DILQSGWYTY

SEQ ID NO: 588 - protein, 13 aa, synthetic construct
DGIYSGGRYYPSS

SEQ ID NO: 589 - protein, 16 aa, synthetic construct
DLVYYSGNPGDYGMDY

SEQ ID NO: 590 - protein, 9 aa, synthetic construct
NIPYPRVSS

SEQ ID NO: 591 - protein, 21 aa, synthetic construct
DLVVVTTTPPSFPMPYRFLEV

SEQ ID NO: 592 - protein, 21 aa, synthetic construct
DIVVVTTTPPSFPMPYRFLEV

SEQ ID NO: 593 - protein, 8 aa, synthetic construct
RSRFGFEY

SEQ ID NO: 594 - protein, 5 aa, synthetic construct
NHGMG

SEQ ID NO: 595 - protein, 5 aa, synthetic construct
SFAID

SEQ ID NO: 596 - protein, 5 aa, synthetic construct
DYSMD

SEQ ID NO: 597 - protein, 5 aa, synthetic construct
STIMG

SEQ ID NO: 598 - protein, 5 aa, synthetic construct
GHGMG

SEQ ID NO: 599 - protein, 5 aa, synthetic construct
NYGMM

SEQ ID NO: 600 - protein, 5 aa, synthetic construct
LYAMA

SEQ ID NO: 601 - protein, 5 aa, synthetic construct
GYYMS

SEQ ID NO: 602 - protein, 5 aa, synthetic construct
SYTMG

SEQ ID NO: 603 - protein, 5 aa, synthetic construct
INNIN

SEQ ID NO: 604 - protein, 5 aa, synthetic construct
SYAMG

SEQ ID NO: 605 - protein, 5 aa, synthetic construct
TYTMG

SEQ ID NO: 606 - protein, 16 aa, synthetic construct
GSYTDGSTYYADSVKG

SEQ ID NO: 607 - protein, 17 aa, synthetic construct
AINRGGDRTYYSDSVKG

SEQ ID NO: 608 - protein, 17 aa, synthetic construct
AINRNGGSTYYAESMKG

SEQ ID NO: 609 - protein, 17 aa, synthetic construct
ISARSGDSESYASSVKD

SEQ ID NO: 610 - protein, 17 aa, synthetic construct
AITWSGGLTYYEDSVKG

SEQ ID NO: 611 - protein, 17 aa, synthetic construct
AISWSGGLTYYGDSVKG

SEQ ID NO: 612 - protein, 17 aa, synthetic construct
AISWSGGLTYYADSVKG

SEQ ID NO: 613 - protein, 17 aa, synthetic construct
AIAWNSGLTYYGDSVKG

SEQ ID NO: 614 - protein, 17 aa, synthetic construct
AISWSGVSTAYADSVKG

SEQ ID NO: 615 - protein, 17 aa, synthetic construct
YIDSGGGSTYYTDSVRG

SEQ ID NO: 616 - protein, 17 aa, synthetic construct
DISNGGVTTRYADSVKG

SEQ ID NO: 617 - protein, 17 aa, synthetic construct
SIYSDDSNTYYADSVKG

SEQ ID NO: 618 - protein, 16 aa, synthetic construct
AVNWDNVKNYADPVKG

SEQ ID NO: 619 - protein, 17 aa, synthetic construct
TTRWRGDSTYYADSVAG

SEQ ID NO: 620 - protein, 17 aa, synthetic construct
TISLSGGSTFYSDSAKG

SEQ ID NO: 621 - protein, 17 aa, synthetic construct
TISLSGGSTFYSGSAKG

SEQ ID NO: 622 - protein, 17 aa, synthetic construct
AISSSGDSTYYTDSVKG

SEQ ID NO: 623 - protein, 11 aa, synthetic construct
RQYYRSGYVDY

SEQ ID NO: 624 - protein, 15 aa, synthetic construct
GGRVSADGKKWEYDY

SEQ ID NO: 625 - protein, 7 aa, synthetic construct
NTGAGTI

SEQ ID NO: 626 - protein, 17 aa, synthetic construct
RSTFRTALVNTVTAYDT

SEQ ID NO: 627 - protein, 17 aa, synthetic construct
RTTFRTGLIVTVTAYDT

SEQ ID NO: 628 - protein, 17 aa, synthetic construct
RRTFRTALINTVTAYDT

SEQ ID NO: 629 - protein, 17 aa, synthetic construct
RRTFRTALINTITAYDT

SEQ ID NO: 630 - protein, 17 aa, synthetic construct
RRTFRTGLINTVTAYDT

SEQ ID NO: 631 - protein, 17 aa, synthetic construct
RRTFRTGLIDTVTAYDT

SEQ ID NO: 632 - protein, 15 aa, synthetic construct
GLYSRPTTERREYIY

SEQ ID NO: 633 - protein, 15 aa, synthetic construct
GLYSRPTTERRDYIY

SEQ ID NO: 634 - protein, 11 aa, synthetic construct
AIGVVSGSLEV

SEQ ID NO: 635 - protein, 7 aa, synthetic construct
TTTGWRA

SEQ ID NO: 636 - protein, 13 aa, synthetic construct
SATLRGRDTRFDY

SEQ ID NO: 637 - protein, 11 aa, synthetic construct
GTNLPTRGSGS

SEQ ID NO: 638 - protein, 11 aa, synthetic construct
GTNLPTIESGS

SEQ ID NO: 639 - protein, 6 aa, synthetic construct
KGGVDV

SEQ ID NO: 640 - protein, 14 aa, synthetic construct
RPVLISRSSTDYAY

SEQ ID NO: 641 - protein, 14 aa, synthetic construct
RPVLISRSSIDYAY

SEQ ID NO: 642 - protein, 15 aa, synthetic construct
GEEVAGKYFRALYDY

SEQ ID NO: 643 - protein, 5 aa, synthetic construct
NYAMG

SEQ ID NO: 644 - protein, 17 aa, synthetic construct
AITWSGGSTYYANSVKG

SEQ ID NO: 645 - protein, 17 aa, synthetic construct
AISWSGGSTYYANSVKG

SEQ ID NO: 646 - protein, 17 aa, synthetic construct
DISWSGGTTNYANSVKG

SEQ ID NO: 647 - protein, 17 aa, synthetic construct
AINWSGGRIYYTDSVKG

SEQ ID NO: 648 - protein, 17 aa, synthetic construct
AIRWSGGSTYYGDSVKG

SEQ ID NO: 649 - protein, 17 aa, synthetic construct
AISWSGGRIYYADSVKG

SEQ ID NO: 650 - protein, 17 aa, synthetic construct
AISWSGGSIYYADSVKG

SEQ ID NO: 651 - protein, 17 aa, synthetic construct
AISWSGGSTYYADSVKG

SEQ ID NO: 652 - protein, 17 aa, synthetic construct
AISWRGVNTYYADSVKG

SEQ ID NO: 653 - protein, 17 aa, synthetic construct
AISWSGGGTYYADSVKG

SEQ ID NO: 654 - protein, 15 aa, synthetic construct
GEEVAGKYFRPLYDY

SEQ ID NO: 655 - protein, 15 aa, synthetic construct
GEEVAGKYFRQLYDY

SEQ ID NO: 656 - protein, 15 aa, synthetic construct
GEEVDGKYFRPLYDY

SEQ ID NO: 657 - protein, 10 aa, synthetic construct
GTNWSIPPDY

SEQ ID NO: 658 - protein, 14 aa, synthetic construct
DPIGLGYEMGEYDY

SEQ ID NO: 659 - protein, 12 aa, synthetic construct
DDFERTMTEVRY

SEQ ID NO: 660 - protein, 13 aa, synthetic construct
DGTLRTPMNLIHY

SEQ ID NO: 661 - protein, 13 aa, synthetic construct
DPSLSRTMDEIGS

SEQ ID NO: 662 - protein, 12 aa, synthetic construct
GPLGATMSEIGS

SEQ ID NO: 663 - protein, 30 aa, synthetic construct
QVQLVESGGGLVQPGGSLRLSCAASGFSLD

SEQ ID NO: 664 - protein, 30 aa, synthetic construct
EVQLVESGGGLVQPGGSLRLSCAASGFALD

SEQ ID NO: 665 - protein, 30 aa, synthetic construct
QLQLVESGGGLVQPGGSLRLSCVASGFALD

SEQ ID NO: 666 - protein, 14 aa, synthetic construct
WFRQAPGKEREGVS

SEQ ID NO: 667 - protein, 14 aa, synthetic construct
WFRQAPGKEREGVA

SEQ ID NO: 668 - protein, 14 aa, synthetic construct
WFRQAPGKEREGLS

SEQ ID NO: 669 - protein, 32 aa, synthetic construct
RFTISRDDAKATVFLQMNNLKPEDTAVYYCAA

SEQ ID NO: 670 - protein, 32 aa, synthetic construct
RFTISRDNAKRTVSLQMNSLKPEDTAVYYCAA

SEQ ID NO: 671 - protein, 32 aa, synthetic construct
RFTISRDNAKTTVSLLMSSLKPEDTAVYYCAA

SEQ ID NO: 672 - DNA, 1674 bp, Homo sapiens
  source 1..1674: mol_type = other DNA
atgccacctcctcgcctcctcttcttcctcctcttcctcacccccatggaagtcaggcccgaggaacctctagtggtgaaggtggaaggtgagggagataacgctgtgctgcagtgcctcaaggggacctcagatggccccactcagcagctgacctggtctcgggagtccccgcttaaacccttcttaaaactcagcctggggctgccaggcctgggaatccacatgaggcccctggcatcctggcttttcatcttcaacgtctctcaacagatggggggcttctacctgtgccagccggggcccccctctgagaaggcctggcagcctggctggacagtcaatgtggagggcagcggggagctgttccggtggaatgtttcggacctaggtggcctgggctgtggcctgaagaacaggtcctcagagggccccagctccccttccgggaagctcatgagccccaagctgtatgtgtgggccaaagaccgccctgagatctgggagggagagcctccgtgtgtcccaccgagggacagcctgaaccagagcctcagccaggacctcaccatggcccctggctccacactctggctgtcctgtggggtaccccctgactctgtgtccaggggccccctctcctggacccatgtgcaccccaaggggcctaagtcattgctgagcctagagctgaaggacgatcgcccggccagagatatgtgggtaatggagacgggtctgttgttgccccgggccacagctcaagacgctggaaagtattattgtcaccgtggcaacctgaccatgtcattccacctggagatcactgctcggccagtactatggcactggctgctgaggactggtggctggaaggtctcagctgtgactttggcttatctgatcttctgcctgtgttcccttgtgggcattcttcatcttcaaagagccctggtcctgaggaggaaaagaaagcgaatgactgaccccaccaggagattcttcaaagtgacgcctcccccaggaagcgggccccagaaccagtacgggaacgtgctgtctctccccacacccacctcaggcctcggacgcgcccagcgttgggccgcaggcctggggggcactgccccgtcttatggaaacccgagcagcgacgtccaggcggatggagccttggggtcccggagcccgccgggagtgggcccagaagaagaggaaggggagggctatgaggaacctgacagtgaggaggactccgagttctatgagaacgactccaaccttgggcaggaccagctctcccaggatggcagcggctacgagaaccctgaggatgagcccctgggtcctgaggatgaagactccttctccaacgctgagtcttatgagaacgaggatgaagagctgacccagccggtcgccaggacaatggacttcctgagccctcatgggtcagcctgggaccccagccgggaagcaacctccctggggtcccagtcctatgaggatatgagaggaatcctgtatgcagccccccagctccgctccattcggggccagcctggacccaatcatgaggaagatgcagactcttatgagaacatggataatcccgatgggccagacccagcctggggaggagggggccgcatgggcacctggagcaccaggtga

SEQ ID NO: 673 - protein, 30 aa, synthetic construct
QVQLVESGGGLVQVGGSLRLSCSISRSIAI

SEQ ID NO: 674 - protein, 30 aa, synthetic construct
QLQLVESGGGLVQAGGSLRLSCAASDPIVT

SEQ ID NO: 675 - protein, 30 aa, synthetic construct
QLQLVESGGGLVQAGGSLRLSCAASGNIVD

SEQ ID NO: 676 - protein, 30 aa, synthetic construct
EVQLVESGGGLVQAGGSLRLSCAASGNIVD

SEQ ID NO: 677 - protein, 30 aa, synthetic construct
EVQLVESGGGLVQAGGSLRLSCAASGNIVE

SEQ ID NO: 678 - protein, 30 aa, synthetic construct
QVQLVESGGGLVQAGGSLRLSCAASGNIVD

SEQ ID NO: 679 - protein, 30 aa, synthetic construct
QVQLQESGGGLVQAGGSLRLSCAASGNSVD

SEQ ID NO: 680 - protein, 14 aa, synthetic construct
WYREAEGKQRELVA

SEQ ID NO: 681 - protein, 14 aa, synthetic construct
WYRQAPGKQRELVA

SEQ ID NO: 682 - protein, 14 aa, synthetic construct
WYRQAPGKQRDLVA

SEQ ID NO: 683 - protein, 12 aa, synthetic construct
WYRQAPGRDLVA

SEQ ID NO: 684 - protein, 32 aa, synthetic construct
RFTVSKDTANNTLDLQMNSLRPEDTAVYRCAA

SEQ ID NO: 685 - protein, 32 aa, synthetic construct
RFTISRDNAKNTLYLQMNSLKPEDSAVYYCRA

SEQ ID NO: 686 - protein, 32 aa, synthetic construct
RFTISRDNAKNTVYLQMNSLKPEDTATYYCYA

SEQ ID NO: 687 - protein, 32 aa, synthetic construct
RFTISRDNVKNTVYLQMNSLKPEDTATYYCYA

SEQ ID NO: 688 - protein, 32 aa, synthetic construct
RFTISRDNVKNTVSLQMNSLKPEDTATYYCYA

SEQ ID NO: 689 - protein, 32 aa, synthetic construct
RFTISRDNVKNTVYLQMNSLKPEDTGTYYCYA

SEQ ID NO: 690 - protein, 11 aa, synthetic construct
WGQGAQVTVSS

SEQ ID NO: 691 - protein, 30 aa, synthetic construct
QVQLVESGGGLVQAGGSLRLSCAASGNGVD

SEQ ID NO: 692 - protein, 30 aa, synthetic construct
QLQLVESGGGLVQTGGSLNLSCAASGAFVS

SEQ ID NO: 693 - protein, 30 aa, synthetic construct
QVQLQESGGGLVQPGGSLRLSCAASGSIFS

SEQ ID NO: 694 - protein, 30 aa, synthetic construct
QVQLVESGGGLVQAGGSLRLSCAASGSIFS

SEQ ID NO: 695 - protein, 30 aa, synthetic construct
QVQLVESGGGLVQPGGSLRLSCAASGSIFR

SEQ ID NO: 696 - protein, 30 aa, synthetic construct
QVQLVESGGGLVQPGGSLRLSCAASGSIFS

SEQ ID NO: 697 - protein, 31 aa, synthetic construct
QVQLVESGGGLVQAGDSLRLSCAAASGRALS

SEQ ID NO: 698 - protein, 30 aa, synthetic construct
QVQLVESGGGSVEPGGSLRLSCATSGLILS

SEQ ID NO: 699 - protein, 30 aa, synthetic construct
EVQLVESGGGLAQPGGSLRLSCVASGFAFG

SEQ ID NO: 700 - protein, 30 aa, synthetic construct
EVQLVESGGGLVQPGGSLRLSCSASGFPFD

SEQ ID NO: 701 - protein, 30 aa, synthetic construct
QVQLVESGGGLVQPGGSLRLSCTASGRTIA

SEQ ID NO: 702 - protein, 30 aa, synthetic construct
QVQLVESGGRLVQAGGSLRLSCAASGRTFN

SEQ ID NO: 703 - protein, 30 aa, synthetic construct
QVQLVESGGGLVQPGGSLRLSCAASGSTFN

SEQ ID NO: 704 - protein, 30 aa, synthetic construct
EVQLVESGGGLVHAGGSLRLSCVASGRTFN

SEQ ID NO: 705 - protein, 30 aa, synthetic construct
EVQLVESGGGLVHAGGSLRLSCAASGRTFN

SEQ ID NO: 706 - protein, 30 aa, synthetic construct
QVQLVESGGGLVHAGGSLRLSCAASGRTFN

SEQ ID NO: 707 - protein, 30 aa, synthetic construct
QVQLQESGGGLVQAGETLGLSCVHSGRAFS

SEQ ID NO: 708 - protein, 30 aa, synthetic construct
QVQLVESGGGLVQAGESLRLSCVASGRALS

SEQ ID NO: 709 - protein, 30 aa, synthetic construct
QVQLVESGGGKVQPGGSLRLSCAASGFTFS

SEQ ID NO: 710 - protein, 30 aa, synthetic construct
QVQLVESGGGLVQPGGSLRLSCAASGFLFS

SEQ ID NO: 711 - protein, 30 aa, synthetic construct
EVQLVESGGGLVQPGGSLRLSCAASGFTFS

SEQ ID NO: 712 - protein, 30 aa, synthetic construct
QLQLVESGGGLVRAGGSLRLSCVLSGRTFS

SEQ ID NO: 713 - protein, 30 aa, synthetic construct
QVQLVESGGGLVQTGGSLRLSCAASGRTFS

SEQ ID NO: 714 - protein, 30 aa, synthetic construct
QVQLVESGGGLVQAGGSLRLSCAASGRTFS

SEQ ID NO: 715 - protein, 30 aa, synthetic construct
QVQLVESGGGLVQAGGSLRLSCAAASLTFD

SEQ ID NO: 716 - protein, 30 aa, synthetic construct
QVQLVESGGGLVQAGGSLRLSCVASGRTFS

SEQ ID NO: 717 - protein, 30 aa, synthetic construct
QVQLVESGGGLVQPGGSLRLSCVLSGRTFS

SEQ ID NO: 718 - protein, 30 aa, synthetic construct
EVQLVESGGGLVQAGGSLRLSCAASGRTFR

SEQ ID NO: 719 - protein, 30 aa, synthetic construct
QLQLVESGGGLVQAGGSLRLSCAASGRTVS

SEQ ID NO: 720 - protein, 30 aa, synthetic construct
QVQLVESGGGLVQAGGSLRLSCAASGRTFT

SEQ ID NO: 721 - protein, 30 aa, synthetic construct
EVQLVESGGGLVQAGGSLRLSCAASGRTFS

SEQ ID NO: 722 - protein, 30 aa, synthetic construct
QVQLVESGGGLVQAGGSLRLSCAASGRTVS

SEQ ID NO: 723 - protein, 14 aa, synthetic construct
WYRQAPGKARELVA

SEQ ID NO: 724 - protein, 14 aa, synthetic construct
WYRQAPGKEREFVA

SEQ ID NO: 725 - protein, 14 aa, synthetic construct
WARQVPGKEVEWVS

SEQ ID NO: 726 - protein, 14 aa, synthetic construct
WVRQPPGKGPEWVS

SEQ ID NO: 727 - protein, 14 aa, synthetic construct
WVRQAPGKGLEWVS

SEQ ID NO: 728 - protein, 14 aa, synthetic construct
WYRQTPGKEREFVA

SEQ ID NO: 729 - protein, 14 aa, synthetic construct
WFRQAPGKEREFVA

SEQ ID NO: 730 - protein, 14 aa, synthetic construct
WFRQAPGKEREFVS

SEQ ID NO: 731 - protein, 14 aa, synthetic construct
WFRQAPGKERQFVA

SEQ ID NO: 732 - protein, 32 aa, synthetic construct
RFTITRDNAKNTVYLQMNSLKPEDTAVYYCNA

SEQ ID NO: 733 - protein, 32 aa, synthetic construct
RFTISRGNAKNTVYLQMNSLTPEDTAVYYCNA

SEQ ID NO: 734 - protein, 32 aa, synthetic construct
RFTISRDNAKNTVYLQMNSLKPEDTAVYYCNA

SEQ ID NO: 735 - protein, 32 aa, synthetic construct
RFTISRDNAKNTVYLQMNSLKPEDTAVYYCNL

SEQ ID NO: 736 - protein, 32 aa, synthetic construct
RFTISRDNAKNTVYLQMNSLLPEDTAVYYCNA

SEQ ID NO: 737 - protein, 32 aa, synthetic construct
RFTISRDNALSTMSLRMNSLKSEDTAIYYCQG

SEQ ID NO: 738 - protein, 32 aa, synthetic construct
RFTISRDNVKNTVYLQMNSLKPEDTAVYYCAA

SEQ ID NO: 739 - protein, 32 aa, synthetic construct
RFTISRDNAKNTLYLQLNSLKPEDTAVYLCAA

SEQ ID NO: 740 - protein, 32 aa, synthetic construct
RFTISRDNAKNTLYLQMSSLKPEDTGVYLCAA

SEQ ID NO: 741 - protein, 32 aa, synthetic construct
RFTISRDNAKNTVYLQMNNLKPEDTAIYYCYW

SEQ ID NO: 742 - protein, 32 aa, synthetic construct
RFTIFRDNAKNLAYLQLNSLKPEDTAVYSCAA

SEQ ID NO: 743 - protein, 32 aa, synthetic construct
RFTIFRDNAKNLGYLQMNSLKPEDTAVYSCAA

SEQ ID NO: 744 - protein, 32 aa, synthetic construct
RFTIFRDNAKGLAYLQMDSLKPEDTAVYSCAA

SEQ ID NO: 745 - protein, 32 aa, synthetic construct
RFTIFRDNAKNLAYLQMNSLKPEDTAVYSCAA

SEQ ID NO: 746 - protein, 32 aa, synthetic construct
RFTISRVNADNTVSLQMNSLKPEDTAVYFCAA

SEQ ID NO: 747 - protein, 34 aa, synthetic construct
RFTISRVNAENTVSVSLQMNSLKPDDTAVYFCAA

SEQ ID NO: 748 - protein, 32 aa, synthetic construct
RFTISRDNAKNTVYLQMNSLKPEDTAVYYCAK

SEQ ID NO: 749 - protein, 32 aa, synthetic construct
RFTISRDNAKNTLYLQMDSLTPGDTAVYYCAV

SEQ ID NO: 750 - protein, 32 aa, synthetic construct
RFTISRDNAKNTVYLQMNSLKPEDTAVYYCAA

SEQ ID NO: 751 - protein, 32 aa, synthetic construct
RFTISRDNVKNRVYLQMNSLKPEDTAVYYCAA

SEQ ID NO: 752 - protein, 32 aa, synthetic construct
RFTISRDSAKNTVYLQMNSLKPEDTAIYYCNA

SEQ ID NO: 753 - protein, 32 aa, synthetic construct
RFTISRDNAKNTVYLQMNSLKPEDAAVYYCAA

SEQ ID NO: 754 - protein, 32 aa, synthetic construct
RFTISRDNAKNTVYLQMDSLKPEDTAVYYCAP

SEQ ID NO: 755 - protein, 32 aa, synthetic construct
RFTISRDNAKNTVDLQMNSLKPEDTAVYYCTP

SEQ ID NO: 756 - protein, 32 aa, synthetic construct
RFTISRDNAKNTVYLQMNSLKPEDTAVYYCAP

SEQ ID NO: 757 - protein, 32 aa, synthetic construct
RFTISRDNAKNTVSLQMNSLKPEDTAVYYCAA

SEQ ID NO: 758 - protein, 32 aa, synthetic construct
RFTISRENAKNTVYLQMISLKPEDTAVYYCAA

SEQ ID NO: 759 - protein, 32 aa, synthetic construct
RFTISRDNAKNTVYLQMISLKPEDTAVYYCAA

SEQ ID NO: 760 - protein, 11 aa, synthetic construct
WGKGTLVTVSS

SEQ ID NO: 761 - protein, 11 aa, synthetic construct
WGQGTLVTVSS

SEQ ID NO: 762 - protein, 11 aa, synthetic construct
RGQGTQVTVSS

SEQ ID NO: 763 - protein, 11 aa, synthetic construct
WGPGTQVTVSS

SEQ ID NO: 764 - protein, 42 aa, Homo sapiens
KRGRKKLLYIFKQPFMRPVQTTQEEDGCSCRFPEEEEGGCEL

SEQ ID NO: 765 - DNA, 126 bp, Homo sapiens
  source 1..126: mol_type = other DNA
aagcggggccggaagaagctgctgtacatcttcaagcagcccttcatgcgccccgtgcagaccacccaggaggaggacggctgcagctgcaggttccccgaggaggaggaggggggctgcgagctg

SEQ ID NO: 766 - protein, 223 aa, synthetic construct
TTTPAPRPPTPAPTIASQPLSLRPEACRPAAGGAVHTRGLDFACDIYIWAPLAGTCGVLLLSLVITLYCKRGRKKLLYIFKQPFMRPVQTTQEEDGCSCRFPEEEEGGCELRVKFSRSADAPAYQQGQNQLYNELNLGRREEYDVLDKRRGRDPEMGGKPRRKNPQEGLYNELQKDKMAEAYSEIGMKGERRRGKGHDGLYQGLSTATKDTYDALHMQALPPR

SEQ ID NO: 767 - protein, 21 aa, Homo sapiens
MALPVTALLLPLALLLHAARP

SEQ ID NO: 768 - DNA, 63 bp, Homo sapiens
  source 1..63: mol_type = other DNA
atggccctgcccgttaccgccctactcctgcccctggccctcctgctccacgccgccaggccc

SEQ ID NO: 769 - protein, 112 aa, Homo sapiens
RVKFSRSADAPAYQQGQNQLYNELNLGRREEYDVLDKRRGRDPEMGGKPRRKNPQEGLYNELQKDKMAEAYSEIGMKGERRRGKGHDGLYQGLSTATKDTYDALHMQALPPR

SEQ ID NO: 770 - DNA, 336 bp, Homo sapiens
  source 1..336: mol_type = other DNA
cgggtgaagttcagcaggagcgccgacgcccctgcttaccagcagggccagaatcagctgtacaacgagctgaatctgggccggagggaggagtacgacgtgctggacaagcggaggggcagggaccccgagatgggcggcaagcccaggcggaagaacccccaggaggggctgtacaacgagctgcagaaggacaagatggccgaggcctactccgagatcggcatgaagggcgagaggcggagaggcaagggccatgacggcctgtaccagggcctgtccaccgccaccaaggacacctacgacgccctgcacatgcaggccctgcccccccgc

SEQ ID NO: 771 - protein, 45 aa, Homo sapiens
TTTPAPRPPTPAPTIASQPLSLRPEACRPAAGGAVHTRGLDFACD

SEQ ID NO: 772 - DNA, 135 bp, Homo sapiens
  source 1..135: mol_type = other DNA
accaccacccctgcccccaggccccccacccccgcccccaccatcgccagccagcccctgtccctgcggcccgaggcctgccggcccgccgccggcggcgccgtgcacacccggggcctggacttcgcctgcgac

SEQ ID NO: 773 - protein, 24 aa, Homo sapiens
IYIWAPLAGTCGVLLLSLVITLYC

SEQ ID NO: 774 - DNA, 72 bp, Homo sapiens
  source 1..72: mol_type = other DNA
atctacatctgggcccccctggccggaacctgcggcgtgctgctgctgtccctggtgatcaccctgtactgc

SEQ ID NO: 775 - protein, 557 aa, Homo sapiens [sequence omitted]

SEQ ID NO: 776 - protein, 8 aa, synthetic construct
DYKDDDDK

SEQ ID NO: 777 - protein, 6 aa, synthetic construct
HHHHHH

SEQ ID NO: 778 - protein, 13 aa, synthetic construct
GAPVPYPDPLEPR

SEQ ID NO: 779 - protein, 8 aa, synthetic construct
RSRFGFEY

SEQ ID NO: 780 - protein, 30 aa, synthetic construct
QVQLVESGGGLVQAGGSLRLSCAAASHTFD

SEQ ID NO: 781 - protein, 31 aa, synthetic construct
  VARIANT 1: note = X is E or Q
  VARIANT 2: note = X is L or V
  VARIANT 5: note = X is V or Q
  VARIANT 10: note = X is G or R
  VARIANT 11: note = X is K, L, or S
  VARIANT 12: note = X is A or V
  VARIANT 13: note = X is E, H, Q, or R
  VARIANT 14: note = X is A, P, T, or V
  VARIANT 16: note = X is D, E, or G
  VARIANT 17: note = X is S or T
  VARIANT 19: note = X is G, N, or R
  VARIANT 24: note = X is A or null
  VARIANT 25: note = X is A, H, I, L, or T
  VARIANT 26: note = X is A or S
  VARIANT 27: note = X is D, G, R, or S
  VARIANT 28: note = X is A, F, H, L, N, P, R, or S
  VARIANT 29: note = X is A, F, G, I, L, P, S, or T
  VARIANT 30: note = X is A, F, I, L, or V
  VARIANT 31: note = X is A, D, E, G, I, N, R, S, or T
XXQLXESGGXXXXXGXXLXLSCAXXXXXXXX

SEQ ID NO: 782 - protein, 34 aa, synthetic construct
  VARIANT 4: note = X is I or V
  VARIANT 5: note = X is F, S, or T
  VARIANT 6: note = X is K or R
  VARIANT 7: note = X is D, E, G, or V
  VARIANT 8: note = X is D, N, S, or T
  VARIANT 9: note = X is A or V
  VARIANT 10: note = X is D, E, K, L, or N
  VARIANT 11: note = X is A, G, N, R, S, or T
  VARIANT 12: note = X is L, R, or T
  VARIANT 13: note = X is A, G, L, M, or V
  VARIANT 14: note = X is null or S
  VARIANT 15: note = X is null or V
  VARIANT 16: note = X is D, F, S, or Y
  VARIANT 18: note = X is Q or R
  VARIANT 19: note = X is L or M
  VARIANT 20: note = X is D, I, N, or S
  VARIANT 21: note = X is is N or S
  VARIANT 23: note = X is K, L, R, or T
  VARIANT 24: note = X is P or S
  VARIANT 25: note = X is D, E, or G
  VARIANT 27: note = X is A, S, or T
  VARIANT 28: note = X is A or G
  VARIANT 29: note = X is I, T, or V
  VARIANT 31: note = X is F, L, R, S, or Y
  VARIANT 33: note = X is A, N, Q, R, T, or Y
  VARIANT 34: note = X is A, G, K, L, P, V, or W
RFTXXXXXXXXXXXXXLXXXXLXXXDXXXYXCXX

SEQ ID NO: 783 - protein, 11 aa, synthetic construct
  VARIANT 1: note = X is R or W
  VARIANT 3: note = X is K, P, or Q
  VARIANT 5: note = X is A or T
  VARIANT 6: note = X is L or Q
XGXGXXVTVSS

SEQ ID NO: 784 - protein, 15 aa, synthetic construct
GGGGSGGGGSGGGGS

SEQ ID NO: 785 - protein, 371 aa, synthetic construct
MALPVTALLLPLALLLHAARPEVQLVESGGGLVQPGGSLRLSCAASGFALDGYTIGWFRQAPGKEREGVACISRSDTSTKYADSVKGRFTISRDNAKRTVSLQMNSLKPEDTAVYYCAASLQSGLLSRFLLPRQYDHWGQGTQVTVSSTTTPAPRPPTPAPTIASQPLSLRPEACRPAAGGAVHTRGLDFACDIYIWAPLAGTCGVLLLSLVITLYCKRGRKKLLYIFKQPFMRPVQTTQEEDGCSCRFPEEEEGGCELRVKFSRSADAPAYQQGQNQLYNELNLGRREEYDVLDKRRGRDPEMGGKPRRKNPQEGLYNELQKDKMAEAYSEIGMKGERRRGKGHDGLYQGLSTATKDTYDALHMQALPPR

SEQ ID NO: 786 - protein, 371 aa, synthetic construct
MALPVTALLLPLALLLHAARPQLQLVESGGGLVQPGGSLRLSCVASGFALDSYTIGWFRQAPGKEREGLSCISRSTSDARYADSVKGRFTISRDNAKTTVSLLMSSLKPEDTAVYYCAASRQTGLLSTFLLPRQYDHWGQGTQVTVSSTTTPAPRPPTPAPTIASQPLSLRPEACRPAAGGAVHTRGLDFACDIYIWAPLAGTCGVLLLSLVITLYCKRGRKKLLYIFKQPFMRPVQTTQEEDGCSCRFPEEEEGGCELRVKFSRSADAPAYQQGQNQLYNELNLGRREEYDVLDKRRGRDPEMGGKPRRKNPQEGLYNELQKDKMAEAYSEIGMKGERRRGKGHDGLYQGLSTATKDTYDALHMQALPPR

SEQ ID NO: 787 - protein, 371 aa, synthetic construct
MALPVTALLLPLALLLHAARPQVQLVESGGGLVQPGGSLRLSCAASGFSLDFYSIGWFRQAPGKEREGVSCITWSGERTNYKDSVKGRFTISRDDAKATVFLQMNNLKPEDTAVYYCAADSGYPCYGSSWSSVGYDFWGQGTQVTVSSTTTPAPRPPTPAPTIASQPLSLRPEACRPAAGGAVHTRGLDFACDIYIWAPLAGTCGVLLLSLVITLYCKRGRKKLLYIFKQPFMRPVQTTQEEDGCSCRFPEEEEGGCELRVKFSRSADAPAYQQGQNQLYNELNLGRREEYDVLDKRRGRDPEMGGKPRRKNPQEGLYNELQKDKMAEAYSEIGMKGERRRGKGHDGLYQGLSTATKDTYDALHMQALPPR

SEQ ID NO: 788 - protein, 363 aa, synthetic construct
MALPVTALLLPLALLLHAARPQVQLVESGGGSVEPGGSLRLSCATSGLILSNHGMGWARQVPGKEVEWVSGSYTDGSTYYADSVKGRFTISRDNVKNTVYLQMNSLKPEDTAVYYCAARQYYRSGYVDYWGQGTQVTVSSTTTPAPRPPTPAPTIASQPLSLRPEACRPAAGGAVHTRGLDFACDIYIWAPLAGTCGVLLLSLVITLYCKRGRKKLLYIFKQPFMRPVQTTQEEDGCSCRFPEEEEGGCELRVKFSRSADAPAYQQGQNQLYNELNLGRREEYDVLDKRRGRDPEMGGKPRRKNPQEGLYNELQKDKMAEAYSEIGMKGERRRGKGHDGLYQGLSTATKDTYDALHMQALPPR

SEQ ID NO: 789 - protein, 364 aa, synthetic construct
MALPVTALLLPLALLLHAARPQVQLVESGGGKVQPGGSLRLSCAASGFTFSNYGMMWVRQAPGKGLEWVSYIDSGGGSTYYTDSVRGRFTISRDNAKNTVYLQMNSLKPEDTAVYYCAKAIGVVSGSLEVWGQGTLVTVSSTTTPAPRPPTPAPTIASQPLSLRPEACRPAAGGAVHTRGLDFACDIYIWAPLAGTCGVLLLSLVITLYCKRGRKKLLYIFKQPFMRPVQTTQEEDGCSCRFPEEEEGGCELRVKFSRSADAPAYQQGQNQLYNELNLGRREEYDVLDKRRGRDPEMGGKPRRKNPQEGLYNELQKDKMAEAYSEIGMKGERRRGKGHDGLYQGLSTATKDTYDALHMQALPPR

SEQ ID NO: 790 - protein, 365 aa, synthetic construct
MALPVTALLLPLALLLHAARPQVQLVESGGGLVQAGGSLRLSCAASGRTFTSYAMGWFRQAPGKEREFVAAISWRGVNTYYADSVKGRFTISRENAKNTVYLQMISLKPEDTAVYYCAAGPLGATMSEIGSWGQGTQVTVSSTTTPAPRPPTPAPTIASQPLSLRPEACRPAAGGAVHTRGLDFACDIYIWAPLAGTCGVLLLSLVITLYCKRGRKKLLYIFKQPFMRPVQTTQEEDGCSCRFPEEEEGGCELRVKFSRSADAPAYQQGQNQLYNELNLGRREEYDVLDKRRGRDPEMGGKPRRKNPQEGLYNELQKDKMAEAYSEIGMKGERRRGKGHDGLYQGLSTATKDTYDALHMQALPPR

SEQ ID NO: 791 - protein, 365 aa, synthetic construct
MALPVTALLLPLALLLHAARPEVQLVESGGGLVQAGGSLRLSCAASGRTFSNYAMGWFRQAPGKEREFVSAISWSGGSTYYADSVKGRFTISRDNAKNTVYLQMISLKPEDTAVYYCAAGPLGATMSEIGSWGQGTQVTVSSTTTPAPRPPTPAPTIASQPLSLRPEACRPAAGGAVHTRGLDFACDIYIWAPLAGTCGVLLLSLVITLYCKRGRKKLLYIFKQPFMRPVQTTQEEDGCSCRFPEEEEGGCELRVKFSRSADAPAYQQGQNQLYNELNLGRREEYDVLDKRRGRDPEMGGKPRRKNPQEGLYNELQKDKMAEAYSEIGMKGERRRGKGHDGLYQGLSTATKDTYDALHMQALPPR

SEQ ID NO: 792 - protein, 365 aa, synthetic construct
MALPVTALLLPLALLLHAARPQVQLVESGGGLVQAGGSLRLSCAASGRTVSSYAMGWFRQAPGKEREFVAAISWSGGGTYYADSVKGRFTISRDNAKNTVYLQMISLKPEDTAVYYCAAGPLGATMSEIGSWGQGTQVTVSSTTTPAPRPPTPAPTIASQPLSLRPEACRPAAGGAVHTRGLDFACDIYIWAPLAGTCGVLLLSLVITLYCKRGRKKLLYIFKQPFMRPVQTTQEEDGCSCRFPEEEEGGCELRVKFSRSADAPAYQQGQNQLYNELNLGRREEYDVLDKRRGRDPEMGGKPRRKNPQEGLYNELQKDKMAEAYSEIGMKGERRRGKGHDGLYQGLSTATKDTYDALHMQALPPR

SEQ ID NO: 793 - protein, 365 aa, synthetic construct
MALPVTALLLPLALLLHAARPQVQLVESGGGLVQAGGSLRLSCAASGRTVSSYAMGWFRQAPGKEREFVAAISWSGGSTYYADSVKGRFTISRDNAKNTVYLQMISLKPEDTAVYYCAAGPLGATMSEIGSWGQGTQVTVSSTTTPAPRPPTPAPTIASQPLSLRPEACRPAAGGAVHTRGLDFACDIYIWAPLAGTCGVLLLSLVITLYCKRGRKKLLYIFKQPFMRPVQTTQEEDGCSCRFPEEEEGGCELRVKFSRSADAPAYQQGQNQLYNELNLGRREEYDVLDKRRGRDPEMGGKPRRKNPQEGLYNELQKDKMAEAYSEIGMKGERRRGKGHDGLYQGLSTATKDTYDALHMQALPPR

SEQ ID NO: 794 - protein, 368 aa, synthetic construct
MALPVTALLLPLALLLHAARPEVQLVESGGGLAQPGGSLRLSCVASGFAFGSFAIDWVRQPPGKGPEWVSAINRGGDRTYYSDSVKGRFTISRDNAKNTLYLQLNSLKPEDTAVYLCAAGGRVSADGKKWEYDYWGQGTQVTVSSTTTPAPRPPTPAPTIASQPLSLRPEACRPAAGGAVHTRGLDFACDIYIWAPLAGTCGVLLLSLVITLYCKRGRKKLLYIFKQPFMRPVQTTQEEDGCSCRFPEEEEGGCELRVKFSRSADAPAYQQGQNQLYNELNLGRREEYDVLDKRRGRDPEMGGKPRRKNPQEGLYNELQKDKMAEAYSEIGMKGERRRGKGHDGLYQGLSTATKDTYDALHMQALPPR

SEQ ID NO: 795 - protein, 368 aa, synthetic construct
MALPVTALLLPLALLLHAARPEVQLVESGGGLVHAGGSLRLSCAASGRTFNTMAWFRQAPGKEREFVAAIAWNSGLTYYGDSVKGRFTIFRDNAKNLAYLQMNSLKPEDTAVYSCAARRTFRTGLINTVTAYDTWGQGTQVTVSSTTTPAPRPPTPAPTIASQPLSLRPEACRPAAGGAVHTRGLDFACDIYIWAPLAGTCGVLLLSLVITLYCKRGRKKLLYIFKQPFMRPVQTTQEEDGCSCRFPEEEEGGCELRVKFSRSADAPAYQQGQNQLYNELNLGRREEYDVLDKRRGRDPEMGGKPRRKNPQEGLYNELQKDKMAEAYSEIGMKGERRRGKGHDGLYQGLSTATKDTYDALHMQALPPR

SEQ ID NO: 796 - protein, 368 aa, synthetic construct
MALPVTALLLPLALLLHAARPEVQLVESGGGLVHAGGSLRLSCVASGRTFNTMAWFRQAPGKEREFVAAISWSGGLTYYGDSVKGRFTIFRDNAKNLAYLQMNSLKPEDTAVYSCAARRTFRTALINTITAYDTWGQGTQVTVSSTTTPAPRPPTPAPTIASQPLSLRPEACRPAAGGAVHTRGLDFACDIYIWAPLAGTCGVLLLSLVITLYCKRGRKKLLYIFKQPFMRPVQTTQEEDGCSCRFPEEEEGGCELRVKFSRSADAPAYQQGQNQLYNELNLGRREEYDVLDKRRGRDPEMGGKPRRKNPQEGLYNELQKDKMAEAYSEIGMKGERRRGKGHDGLYQGLSTATKDTYDALHMQALPPR

SEQ ID NO: 797 - protein, 360 aa, synthetic construct
MALPVTALLLPLALLLHAARPEVQLVESGGGLVQAGGSLRLSCAASGNIVDIDDMGWYRQAPGRDLVASITAGGITKYADSAKGRFTISRDNVKNTVYLQMNSLKPEDTATYYCYAVRRYYPRFDYWGQGTQVTVSSTTTPAPRPPTPAPTIASQPLSLRPEACRPAAGGAVHTRGLDFACDIYIWAPLAGTCGVLLLSLVITLYCKRGRKKLLYIFKQPFMRPVQTTQEEDGCSCRFPEEEEGGCELRVKFSRSADAPAYQQGQNQLYNELNLGRREEYDVLDKRRGRDPEMGGKPRRKNPQEGLYNELQKDKMAEAYSEIGMKGERRRGKGHDGLYQGLSTATKDTYDALHMQALPPR

SEQ ID NO: 798 - protein, 362 aa, synthetic construct
MALPVTALLLPLALLLHAARPEVQLVESGGGLVQAGGSLRLSCAASGNIVEIDDMGWYRQAPGKQRDLVATITAGGITNYASSAKGRFTISRDNVKNTVYLQMNSLKPEDTATYYCYAIRKYYPRFDYWGQGTQVTVSSTTTPAPRPPTPAPTIASQPLSLRPEACRPAAGGAVHTRGLDFACDIYIWAPLAGTCGVLLLSLVITLYCKRGRKKLLYIFKQPFMRPVQTTQEEDGCSCRFPEEEEGGCELRVKFSRSADAPAYQQGQNQLYNELNLGRREEYDVLDKRRGRDPEMGGKPRRKNPQEGLYNELQKDKMAEAYSEIGMKGERRRGKGHDGLYQGLSTATKDTYDALHMQALPPR

SEQ ID NO: 799 - protein, 365 aa, synthetic construct
MALPVTALLLPLALLLHAARPEVQLVESGGGLVQAGGSLRLSCAASGRTFRSYAMGWFRQAPGKEREFVAAISWSGGRIYYADSVKGRFTISRDNAKNTVYLQMNSLKPEDTAVYYCAADDFERTMTEVRYWGQGTQVTVSSTTTPAPRPPTPAPTIASQPLSLRPEACRPAAGGAVHTRGLDFACDIYIWAPLAGTCGVLLLSLVITLYCKRGRKKLLYIFKQPFMRPVQTTQEEDGCSCRFPEEEEGGCELRVKFSRSADAPAYQQGQNQLYNELNLGRREEYDVLDKRRGRDPEMGGKPRRKNPQEGLYNELQKDKMAEAYSEIGMKGERRRGKGHDGLYQGLSTATKDTYDALHMQALPPR

SEQ ID NO: 800 - protein, 366 aa, synthetic construct
MALPVTALLLPLALLLHAARPEVQLVESGGGLVQPGGSLRLSCAASGFTFSGYYMSWVRQAPGKGLEWVSSIYSDDSNTYYADSVKGRFTISRDNAKNTVYLQMNSLKPEDTAVYYCAASATLRGRDTRFDYWGQGTQVTVSSTTTPAPRPPTPAPTIASQPLSLRPEACRPAAGGAVHTRGLDFACDIYIWAPLAGTCGVLLLSLVITLYCKRGRKKLLYIFKQPFMRPVQTTQEEDGCSCRFPEEEEGGCELRVKFSRSADAPAYQQGQNQLYNELNLGRREEYDVLDKRRGRDPEMGGKPRRKNPQEGLYNELQKDKMAEAYSEIGMKGERRRGKGHDGLYQGLSTATKDTYDALHMQALPPR

SEQ ID NO: 801 - protein, 368 aa, synthetic construct
MALPVTALLLPLALLLHAARPEVQLVESGGGLVQPGGSLRLSCSASGFPFDDYSMDWVRQAPGKGLEWVSAINRNGGSTYYAESMKGRFTISRDNAKNTLYLQMSSLKPEDTGVYLCAAGGRVSADGKKWEYDYWGQGTQVTVSSTTTPAPRPPTPAPTIASQPLSLRPEACRPAAGGAVHTRGLDFACDIYIWAPLAGTCGVLLLSLVITLYCKRGRKKLLYIFKQPFMRPVQTTQEEDGCSCRFPEEEEGGCELRVKFSRSADAPAYQQGQNQLYNELNLGRREEYDVLDKRRGRDPEMGGKPRRKNPQEGLYNELQKDKMAEAYSEIGMKGERRRGKGHDGLYQGLSTATKDTYDALHMQALPPR

SEQ ID NO: 802 - protein, 357 aa, synthetic construct
MALPVTALLLPLALLLHAARPQLQLVESGGGLVQAGGSLRLSCAASDPIVTFNTMGWYRQAPGKQRELVARITMSGIPNYADSVKGRFTISRDNAKNTLYLQMNSLKPEDSAVYYCRAEHSGYWGQGTQVTVSSTTTPAPRPPTPAPTIASQPLSLRPEACRPAAGGAVHTRGLDFACDIYIWAPLAGTCGVLLLSLVITLYCKRGRKKLLYIFKQPFMRPVQTTQEEDGCSCRFPEEEEGGCELRVKFSRSADAPAYQQGQNQLYNELNLGRREEYDVLDKRRGRDPEMGGKPRRKNPQEGLYNELQKDKMAEAYSEIGMKGERRRGKGHDGLYQGLSTATKDTYDALHMQALPPR

SEQ ID NO: 803 - protein, 362 aa, synthetic construct
MALPVTALLLPLALLLHAARPQLQLVESGGGLVQAGGSLRLSCAASGNIVDIDDMGWYRQAPGKQRDLVATITAGGIANYADSAKGRFTISRDNAKNTVYLQMNSLKPEDTATYYCYAIRRYYPRFDYWGQGAQVTVSSTTTPAPRPPTPAPTIASQPLSLRPEACRPAAGGAVHTRGLDFACDIYIWAPLAGTCGVLLLSLVITLYCKRGRKKLLYIFKQPFMRPVQTTQEEDGCSCRFPEEEEGGCELRVKFSRSADAPAYQQGQNQLYNELNLGRREEYDVLDKRRGRDPEMGGKPRRKNPQEGLYNELQKDKMAEAYSEIGMKGERRRGKGHDGLYQGLSTATKDTYDALHMQALPPR

SEQ ID NO: 804 - protein, 366 aa, synthetic construct
MALPVTALLLPLALLLHAARPQLQLVESGGGLVQAGGSLRLSCAASGRTVSSYAMGWFRQAPGKEREFVAAISWSGGSTYYADSVKGRFTISRDNAKNTVYLQMNSLKPEDTAVYYCAADPSLSRTMDEIGSWGQGTQVTVSSTTTPAPRPPTPAPTIASQPLSLRPEACRPAAGGAVHTRGLDFACDIYIWAPLAGTCGVLLLSLVITLYCKRGRKKLLYIFKQPFMRPVQTTQEEDGCSCRFPEEEEGGCELRVKFSRSADAPAYQQGQNQLYNELNLGRREEYDVLDKRRGRDPEMGGKPRRKNPQEGLYNELQKDKMAEAYSEIGMKGERRRGKGHDGLYQGLSTATKDTYDALHMQALPPR

SEQ ID NO: 805 - protein, 362 aa, synthetic construct
MALPVTALLLPLALLLHAARPQLQLVESGGGLVQTGGSLNLSCAASGAFVSIDAMAWYRQAPGKARELVAFSSSGGITNYADSVKGRFTITRDNAKNTVYLQMNSLKPEDTAVYYCNADILQSGWYTYWGQGTQVTVSSTTTPAPRPPTPAPTIASQPLSLRPEACRPAAGGAVHTRGLDFACDIYIWAPLAGTCGVLLLSLVITLYCKRGRKKLLYIFKQPFMRPVQTTQEEDGCSCRFPEEEEGGCELRVKFSRSADAPAYQQGQNQLYNELNLGRREEYDVLDKRRGRDPEMGGKPRRKNPQEGLYNELQKDKMAEAYSEIGMKGERRRGKGHDGLYQGLSTATKDTYDALHMQALPPR

SEQ ID NO: 806 - protein, 367 aa, synthetic construct
MALPVTALLLPLALLLHAARPQLQLVESGGGLVRAGGSLRLSCVLSGRTFSSYAMGWFRQAPGKEREFVSTISLSGGSTFYSDSAKGRFTISRDNAKNTVYLQMNSLKPEDAAVYYCAARPVLISRSSTDYAYWGPGTQVTVSSTTTPAPRPPTPAPTIASQPLSLRPEACRPAAGGAVHTRGLDFACDIYIWAPLAGTCGVLLLSLVITLYCKRGRKKLLYIFKQPFMRPVQTTQEEDGCSCRFPEEEEGGCELRVKFSRSADAPAYQQGQNQLYNELNLGRREEYDVLDKRRGRDPEMGGKPRRKNPQEGLYNELQKDKMAEAYSEIGMKGERRRGKGHDGLYQGLSTATKDTYDALHMQALPPR

SEQ ID NO: 807 - protein, 367 aa, synthetic construct
MALPVTALLLPLALLLHAARPQLQLVESGGGLVRAGGSLRLSCVLSGRTFSSYAMGWFRQAPGKEREFVSTISLSGGSTFYSDSAKGRFTISRDNAKNTVYLQMNSLKPEDTAVYYCAARPVLISRSSIDYAYWGPGTQVTVSSTTTPAPRPPTPAPTIASQPLSLRPEACRPAAGGAVHTRGLDFACDIYIWAPLAGTCGVLLLSLVITLYCKRGRKKLLYIFKQPFMRPVQTTQEEDGCSCRFPEEEEGGCELRVKFSRSADAPAYQQGQNQLYNELNLGRREEYDVLDKRRGRDPEMGGKPRRKNPQEGLYNELQKDKMAEAYSEIGMKGERRRGKGHDGLYQGLSTATKDTYDALHMQALPPR

SEQ ID NO: 808 - protein, 368 aa, synthetic construct
MALPVTALLLPLALLLHAARPQVQLQESGGGLVQAGETLGLSCVHSGRAFSGHGMGWFRQAPGKEREFVAAISWSGVSTAYADSVKGRFTISRVNADNTVSLQMNSLKPEDTAVYFCAAGLYSRPTTERREYIYWGQGTQVTVSSTTTPAPRPPTPAPTIASQPLSLRPEACRPAAGGAVHTRGLDFACDIYIWAPLAGTCGVLLLSLVITLYCKRGRKKLLYIFKQPFMRPVQTTQEEDGCSCRFPEEEEGGCELRVKFSRSADAPAYQQGQNQLYNELNLGRREEYDVLDKRRGRDPEMGGKPRRKNPQEGLYNELQKDKMAEAYSEIGMKGERRRGKGHDGLYQGLSTATKDTYDALHMQALPPR

SEQ ID NO: 809 - protein, 362 aa, synthetic construct
MALPVTALLLPLALLLHAARPQVQLQESGGGLVQAGGSLRLSCAASGNSVDIDDMGWYRQAPGKQRDLVATITAGGITKYGDSAKGRFTISRDNVKNTVYLQMNSLKPEDTATYYCYAVRRYYPRFDYWGQGTQVTVSSTTTPAPRPPTPAPTIASQPLSLRPEACRPAAGGAVHTRGLDFACDIYIWAPLAGTCGVLLLSLVITLYCKRGRKKLLYIFKQPFMRPVQTTQEEDGCSCRFPEEEEGGCELRVKFSRSADAPAYQQGQNQLYNELNLGRREEYDVLDKRRGRDPEMGGKPRRKNPQEGLYNELQKDKMAEAYSEIGMKGERRRGKGHDGLYQGLSTATKDTYDALHMQALPPR

SEQ ID NO: 810 - protein, 365 aa, synthetic construct
MALPVTALLLPLALLLHAARPQVQLQESGGGLVQPGGSLRLSCAASGSIFSMNAMGWYRQAPGKQRELVATITDNDFTYYAASVKDRFTISRGNAKNTVYLQMNSLTPEDTAVYYCNADGIYSGGRYYPSSWGQGTQVTVSSTTTPAPRPPTPAPTIASQPLSLRPEACRPAAGGAVHTRGLDFACDIYIWAPLAGTCGVLLLSLVITLYCKRGRKKLLYIFKQPFMRPVQTTQEEDGCSCRFPEEEEGGCELRVKFSRSADAPAYQQGQNQLYNELNLGRREEYDVLDKRRGRDPEMGGKPRRKNPQEGLYNELQKDKMAEAYSEIGMKGERRRGKGHDGLYQGLSTATKDTYDALHMQALPPR

SEQ ID NO: 811 - protein, 373 aa, synthetic construct
MALPVTALLLPLALLLHAARPQVQLQESGGGLVQPGGSLRLSCAASGSIFSVNDMGWYRQAPGKQRELVAASYSGGSTNYADSVKGRFTISRDNAKNTVYLQMNSLLPEDTAVYYCNADLVVVTTTPPSFPMPYRFLEVWGQGTLVTVSSTTTPAPRPPTPAPTIASQPLSLRPEACRPAAGGAVHTRGLDFACDIYIWAPLAGTCGVLLLSLVITLYCKRGRKKLLYIFKQPFMRPVQTTQEEDGCSCRFPEEEEGGCELRVKFSRSADAPAYQQGQNQLYNELNLGRREEYDVLDKRRGRDPEMGGKPRRKNPQEGLYNELQKDKMAEAYSEIGMKGERRRGKGHDGLYQGLSTATKDTYDALHMQALPPR

SEQ ID NO: 812 - protein, 368 aa, synthetic construct
MALPVTALLLPLALLLHAARPQVQLVESGGGLVHAGGSLRLSCAASGRTFNTMAWFRQAPGKEREFVAAISWSGGLTYYADSVKGRFTIFRDNAKGLAYLQMDSLKPEDTAVYSCAARRTFRTALINTVTAYDTWGQGTQVTVSSTTTPAPRPPTPAPTIASQPLSLRPEACRPAAGGAVHTRGLDFACDIYIWAPLAGTCGVLLLSLVITLYCKRGRKKLLYIFKQPFMRPVQTTQEEDGCSCRFPEEEEGGCELRVKFSRSADAPAYQQGQNQLYNELNLGRREEYDVLDKRRGRDPEMGGKPRRKNPQEGLYNELQKDKMAEAYSEIGMKGERRRGKGHDGLYQGLSTATKDTYDALHMQALPPR

SEQ ID NO: 813 - protein, 368 aa, synthetic construct
MALPVTALLLPLALLLHAARPQVQLVESGGGLVHAGGSLRLSCAASGRTFNTMAWFRQAPGKEREFVAAISWSGGLTYYGDSVKGRFTIFRDNAKNLAYLQMNSLKPEDTAVYSCAARRTFRTGLIDTVTAYDTWGQGTQVTVSSTTTPAPRPPTPAPTIASQPLSLRPEACRPAAGGAVHTRGLDFACDIYIWAPLAGTCGVLLLSLVITLYCKRGRKKLLYIFKQPFMRPVQTTQEEDGCSCRFPEEEEGGCELRVKFSRSADAPAYQQGQNQLYNELNLGRREEYDVLDKRRGRDPEMGGKPRRKNPQEGLYNELQKDKMAEAYSEIGMKGERRRGKGHDGLYQGLSTATKDTYDALHMQALPPR

SEQ ID NO: 814 - protein, 362 aa, synthetic construct
MALPVTALLLPLALLLHAARPQVQLVESGGGLVQAGDSLRLSCAAASGRALSGWQMGWYRQAPGKEREFVASISMSDGSTSYQDSVKGRFTISRDNALSTMSLRMNSLKSEDTAIYYCQGRSRFGFEYWGQGTQVTVSSTTTPAPRPPTPAPTIASQPLSLRPEACRPAAGGAVHTRGLDFACDIYIWAPLAGTCGVLLLSLVITLYCKRGRKKLLYIFKQPFMRPVQTTQEEDGCSCRFPEEEEGGCELRVKFSRSADAPAYQQGQNQLYNELNLGRREEYDVLDKRRGRDPEMGGKPRRKNPQEGLYNELQKDKMAEAYSEIGMKGERRRGKGHDGLYQGLSTATKDTYDALHMQALPPR

SEQ ID NO: 815 - protein, 370 aa, synthetic construct
MALPVTALLLPLALLLHAARPQVQLVESGGGLVQAGESLRLSCVASGRALSGHGMGWFRQAPGKEREFVAAISWSGVSTAYADSVKGRFTISRVNAENTVSVSLQMNSLKPDDTAVYFCAAGLYSRPTTERRDYIYWGQGTQVTVSSTTTPAPRPPTPAPTIASQPLSLRPEACRPAAGGAVHTRGLDFACDIYIWAPLAGTCGVLLLSLVITLYCKRGRKKLLYIFKQPFMRPVQTTQEEDGCSCRFPEEEEGGCELRVKFSRSADAPAYQQGQNQLYNELNLGRREEYDVLDKRRGRDPEMGGKPRRKNPQEGLYNELQKDKMAEAYSEIGMKGERRRGKGHDGLYQGLSTATKDTYDALHMQALPPR

SEQ ID NO: 816 - protein, 363 aa, synthetic construct
MALPVTALLLPLALLLHAARPQVQLVESGGGLVQAGGSLRLSCAAASHTFDSYTMGWFRQAPGKEREFVAAVNWDNVKNYADPVKGRFTISRDNVKNRVYLQMNSLKPEDTAVYYCAAGTNLPTRGSGSWGQGTQVTVSSTTTPAPRPPTPAPTIASQPLSLRPEACRPAAGGAVHTRGLDFACDIYIWAPLAGTCGVLLLSLVITLYCKRGRKKLLYIFKQPFMRPVQTTQEEDGCSCRFPEEEEGGCELRVKFSRSADAPAYQQGQNQLYNELNLGRREEYDVLDKRRGRDPEMGGKPRRKNPQEGLYNELQKDKMAEAYSEIGMKGERRRGKGHDGLYQGLSTATKDTYDALHMQALPPR

SEQ ID NO: 817 - protein, 363 aa, synthetic construct
MALPVTALLLPLALLLHAARPQVQLVESGGGLVQAGGSLRLSCAAASLTFDSYTMGWFRQAPGKEREFVAAVNWDNVKNYADPVKGRFTISRDNVKNTVYLQMNSLKPEDTAVYYCAAGTNLPTIESGSWGQGTQVTVSSTTTPAPRPPTPAPTIASQPLSLRPEACRPAAGGAVHTRGLDFACDIYIWAPLAGTCGVLLLSLVITLYCKRGRKKLLYIFKQPFMRPVQTTQEEDGCSCRFPEEEEGGCELRVKFSRSADAPAYQQGQNQLYNELNLGRREEYDVLDKRRGRDPEMGGKPRRKNPQEGLYNELQKDKMAEAYSEIGMKGERRRGKGHDGLYQGLSTATKDTYDALHMQALPPR

SEQ ID NO: 818 - protein, 362 aa, synthetic construct
MALPVTALLLPLALLLHAARPQVQLVESGGGLVQAGGSLRLSCAASGNGVDIDDMGWYRQAPGKQRDLVASITAGGITKYADSAKGRFTISRDNVKNTVYLQMNSLKPEDTATYYCYAIRRFYPRFDYWGQGTQVTVSSTTTPAPRPPTPAPTIASQPLSLRPEACRPAAGGAVHTRGLDFACDIYIWAPLAGTCGVLLLSLVITLYCKRGRKKLLYIFKQPFMRPVQTTQEEDGCSCRFPEEEEGGCELRVKFSRSADAPAYQQGQNQLYNELNLGRREEYDVLDKRRGRDPEMGGKPRRKNPQEGLYNELQKDKMAEAYSEIGMKGERRRGKGHDGLYQGLSTATKDTYDALHMQALPPR

SEQ ID NO: 819 - protein, 362 aa, synthetic construct
MALPVTALLLPLALLLHAARPQVQLVESGGGLVQAGGSLRLSCAASGNGVDIDDMGWYRQAPGKQRDLVASITAGGITNYADSAKGRFTISRDNVKNTVYLQMNSLKPEDTATYYCYAIRRFYPRFDYWGQGTQVTVSSTTTPAPRPPTPAPTIASQPLSLRPEACRPAAGGAVHTRGLDFACDIYIWAPLAGTCGVLLLSLVITLYCKRGRKKLLYIFKQPFMRPVQTTQEEDGCSCRFPEEEEGGCELRVKFSRSADAPAYQQGQNQLYNELNLGRREEYDVLDKRRGRDPEMGGKPRRKNPQEGLYNELQKDKMAEAYSEIGMKGERRRGKGHDGLYQGLSTATKDTYDALHMQALPPR

SEQ ID NO: 820 - protein, 362 aa, synthetic construct
MALPVTALLLPLALLLHAARPQVQLVESGGGLVQAGGSLRLSCAASGNGVDIDDMGWYRQAPGKQRDLVATITAGGITKYADSAKGRFTISRDNVKNTVYLQMNSLKPEDTATYYCYAIRRFYPRFDYWGQGTQVTVSSTTTPAPRPPTPAPTIASQPLSLRPEACRPAAGGAVHTRGLDFACDIYIWAPLAGTCGVLLLSLVITLYCKRGRKKLLYIFKQPFMRPVQTTQEEDGCSCRFPEEEEGGCELRVKFSRSADAPAYQQGQNQLYNELNLGRREEYDVLDKRRGRDPEMGGKPRRKNPQEGLYNELQKDKMAEAYSEIGMKGERRRGKGHDGLYQGLSTATKDTYDALHMQALPPR

SEQ ID NO: 821 - protein, 362 aa, synthetic construct
MALPVTALLLPLALLLHAARPQVQLVESGGGLVQAGGSLRLSCAASGNGVDIDDMGWYRQAPGKQRDLVATITAGGITNYADSAKGRFTISRDNVKNTVYLQMNSLKPEDTGTYYCYAIRKFYPRFDYWGQGTQVTVSSTTTPAPRPPTPAPTIASQPLSLRPEACRPAAGGAVHTRGLDFACDIYIWAPLAGTCGVLLLSLVITLYCKRGRKKLLYIFKQPFMRPVQTTQEEDGCSCRFPEEEEGGCELRVKFSRSADAPAYQQGQNQLYNELNLGRREEYDVLDKRRGRDPEMGGKPRRKNPQEGLYNELQKDKMAEAYSEIGMKGERRRGKGHDGLYQGLSTATKDTYDALHMQALPPR

SEQ ID NO: 822 - protein, 362 aa, synthetic construct
MALPVTALLLPLALLLHAARPQVQLVESGGGLVQAGGSLRLSCAASGNIVDIDDMGWYRQAPGKQRDLVASITAGGITKYADSAKGRFTISRDNVKNTVSLQMNSLKPEDTATYYCYAVRKYYPRFDYWGQGTQVTVSSTTTPAPRPPTPAPTIASQPLSLRPEACRPAAGGAVHTRGLDFACDIYIWAPLAGTCGVLLLSLVITLYCKRGRKKLLYIFKQPFMRPVQTTQEEDGCSCRFPEEEEGGCELRVKFSRSADAPAYQQGQNQLYNELNLGRREEYDVLDKRRGRDPEMGGKPRRKNPQEGLYNELQKDKMAEAYSEIGMKGERRRGKGHDGLYQGLSTATKDTYDALHMQALPPR

SEQ ID NO: 823 - protein, 362 aa, synthetic construct
MALPVTALLLPLALLLHAARPQVQLVESGGGLVQAGGSLRLSCAASGNIVDIDDMGWYRQAPGKQRDLVASITAGRITKYADSAKGRFTISRDNVKNTVYLQMNSLKPEDTATYYCYAIRRSYPRFDYWGQGTQVTVSSTTTPAPRPPTPAPTIASQPLSLRPEACRPAAGGAVHTRGLDFACDIYIWAPLAGTCGVLLLSLVITLYCKRGRKKLLYIFKQPFMRPVQTTQEEDGCSCRFPEEEEGGCELRVKFSRSADAPAYQQGQNQLYNELNLGRREEYDVLDKRRGRDPEMGGKPRRKNPQEGLYNELQKDKMAEAYSEIGMKGERRRGKGHDGLYQGLSTATKDTYDALHMQALPPR

SEQ ID NO: 824 - protein, 363 aa, synthetic construct
MALPVTALLLPLALLLHAARPQVQLVESGGGLVQAGGSLRLSCAASGRTFSNYAMGWFRQAPGKEREFVAAINWSGGRIYYTDSVKGRFTISRDNAKNTVYLQMNSLKPEDTAVYYCAAGTNWSIPPDYWGQGTQVTVSSTTTPAPRPPTPAPTIASQPLSLRPEACRPAAGGAVHTRGLDFACDIYIWAPLAGTCGVLLLSLVITLYCKRGRKKLLYIFKQPFMRPVQTTQEEDGCSCRFPEEEEGGCELRVKFSRSADAPAYQQGQNQLYNELNLGRREEYDVLDKRRGRDPEMGGKPRRKNPQEGLYNELQKDKMAEAYSEIGMKGERRRGKGHDGLYQGLSTATKDTYDALHMQALPPR

SEQ ID NO: 825 - protein, 367 aa, synthetic construct
MALPVTALLLPLALLLHAARPQVQLVESGGGLVQAGGSLRLSCAASGRTFSSYAMGWFRQAPGKEREFVAAIRWSGGSTYYGDSVKGRFTISRDNAKNTVYLQMNSLKPEDTAVYYCAADPIGLGYEMGEYDYWGQGTQVTVSSTTTPAPRPPTPAPTIASQPLSLRPEACRPAAGGAVHTRGLDFACDIYIWAPLAGTCGVLLLSLVITLYCKRGRKKLLYIFKQPFMRPVQTTQEEDGCSCRFPEEEEGGCELRVKFSRSADAPAYQQGQNQLYNELNLGRREEYDVLDKRRGRDPEMGGKPRRKNPQEGLYNELQKDKMAEAYSEIGMKGERRRGKGHDGLYQGLSTATKDTYDALHMQALPPR

SEQ ID NO: 826 - protein, 366 aa, synthetic construct
MALPVTALLLPLALLLHAARPQVQLVESGGGLVQAGGSLRLSCAASGRTFSSYAMGWFRQAPGKEREFVAAISWSGGSIYYADSVKGRFTISRDNAKNTVSLQMNSLKPEDTAVYYCAADGTLRTPMNLIHYWGQGTQVTVSSTTTPAPRPPTPAPTIASQPLSLRPEACRPAAGGAVHTRGLDFACDIYIWAPLAGTCGVLLLSLVITLYCKRGRKKLLYIFKQPFMRPVQTTQEEDGCSCRFPEEEEGGCELRVKFSRSADAPAYQQGQNQLYNELNLGRREEYDVLDKRRGRDPEMGGKPRRKNPQEGLYNELQKDKMAEAYSEIGMKGERRRGKGHDGLYQGLSTATKDTYDALHMQALPPR

SEQ ID NO: 827 - protein, 368 aa, synthetic construct
MALPVTALLLPLALLLHAARPQVQLVESGGGLVQAGGSLRLSCAASGRTFSSYAMGWFRQAPGKEREFVAAISWSGGSTYYANSVKGRFTISRDNAKNTVYLQMNSLKPEDTAVYYCAPGEEVAGKYFRQLYDYWGQGTQVTVSSTTTPAPRPPTPAPTIASQPLSLRPEACRPAAGGAVHTRGLDFACDIYIWAPLAGTCGVLLLSLVITLYCKRGRKKLLYIFKQPFMRPVQTTQEEDGCSCRFPEEEEGGCELRVKFSRSADAPAYQQGQNQLYNELNLGRREEYDVLDKRRGRDPEMGGKPRRKNPQEGLYNELQKDKMAEAYSEIGMKGERRRGKGHDGLYQGLSTATKDTYDALHMQALPPR

SEQ ID NO: 828 - protein, 368 aa, synthetic construct
MALPVTALLLPLALLLHAARPQVQLVESGGGLVQAGGSLRLSCAASGRTFSSYAMGWFRQAPGKEREFVADISWSGGTTNYANSVKGRFTISRDNAKNTVYLQMNSLKPEDTAVYYCAPGEEVDGKYFRPLYDYWGQGTQVTVSSTTTPAPRPPTPAPTIASQPLSLRPEACRPAAGGAVHTRGLDFACDIYIWAPLAGTCGVLLLSLVITLYCKRGRKKLLYIFKQPFMRPVQTTQEEDGCSCRFPEEEEGGCELRVKFSRSADAPAYQQGQNQLYNELNLGRREEYDVLDKRRGRDPEMGGKPRRKNPQEGLYNELQKDKMAEAYSEIGMKGERRRGKGHDGLYQGLSTATKDTYDALHMQALPPR

SEQ ID NO: 829 - protein, 368 aa, synthetic construct
MALPVTALLLPLALLLHAARPQVQLVESGGGLVQAGGSLRLSCAASGRTFSTYTMGWFRQAPGKERQFVAAISSSGDSTYYTDSVKGRFTISRDNAKNTVYLQMDSLKPEDTAVYYCAPGEEVAGKYFRALYDYWGQGTQVTVSSTTTPAPRPPTPAPTIASQPLSLRPEACRPAAGGAVHTRGLDFACDIYIWAPLAGTCGVLLLSLVITLYCKRGRKKLLYIFKQPFMRPVQTTQEEDGCSCRFPEEEEGGCELRVKFSRSADAPAYQQGQNQLYNELNLGRREEYDVLDKRRGRDPEMGGKPRRKNPQEGLYNELQKDKMAEAYSEIGMKGERRRGKGHDGLYQGLSTATKDTYDALHMQALPPR

SEQ ID NO: 830 - protein, 368 aa, synthetic construct
MALPVTALLLPLALLLHAARPQVQLVESGGGLVQAGGSLRLSCAASGSIFSINAMAWYRQAPGKQRELVAVITSGGSTNYADSVKGRFTISRDNAKNTVYLQMNSLKPEDTAVYYCNADLVYYSGNPGDYGMDYWGKGTLVTVSSTTTPAPRPPTPAPTIASQPLSLRPEACRPAAGGAVHTRGLDFACDIYIWAPLAGTCGVLLLSLVITLYCKRGRKKLLYIFKQPFMRPVQTTQEEDGCSCRFPEEEEGGCELRVKFSRSADAPAYQQGQNQLYNELNLGRREEYDVLDKRRGRDPEMGGKPRRKNPQEGLYNELQKDKMAEAYSEIGMKGERRRGKGHDGLYQGLSTATKDTYDALHMQALPPR

SEQ ID NO: 831 - protein, 359 aa, synthetic construct
MALPVTALLLPLALLLHAARPQVQLVESGGGLVQAGGSLRLSCVASGRTFSINNINWYRQAPGKEREFVATTRWRGDSTYYADSVAGRFTISRDSAKNTVYLQMNSLKPEDTAIYYCNAKGGVDVWGQGTQVTVSSTTTPAPRPPTPAPTIASQPLSLRPEACRPAAGGAVHTRGLDFACDIYIWAPLAGTCGVLLLSLVITLYCKRGRKKLLYIFKQPFMRPVQTTQEEDGCSCRFPEEEEGGCELRVKFSRSADAPAYQQGQNQLYNELNLGRREEYDVLDKRRGRDPEMGGKPRRKNPQEGLYNELQKDKMAEAYSEIGMKGERRRGKGHDGLYQGLSTATKDTYDALHMQALPPR

SEQ ID NO: 832 - protein, 360 aa, synthetic construct
MALPVTALLLPLALLLHAARPQVQLVESGGGLVQPGGSLRLSCAASGFLFSLYAMAWVRQAPGKGLEWVSDISNGGVTTRYADSVKGRFTISRDNAKNTLYLQMDSLTPGDTAVYYCAVTTTGWRARGQGTQVTVSSTTTPAPRPPTPAPTIASQPLSLRPEACRPAAGGAVHTRGLDFACDIYIWAPLAGTCGVLLLSLVITLYCKRGRKKLLYIFKQPFMRPVQTTQEEDGCSCRFPEEEEGGCELRVKFSRSADAPAYQQGQNQLYNELNLGRREEYDVLDKRRGRDPEMGGKPRRKNPQEGLYNELQKDKMAEAYSEIGMKGERRRGKGHDGLYQGLSTATKDTYDALHMQALPPR

SEQ ID NO: 833 - protein, 361 aa, synthetic construct
MALPVTALLLPLALLLHAARPQVQLVESGGGLVQPGGSLRLSCAASGSIFRPNDMGWYRQAPGKQRELVAIITDGGITNYAATVKGRFTISRDNAKNTVYLQMNSLKPEDTAVYYCNLNIPYPRVSSWGQGTQVTVSSTTTPAPRPPTPAPTIASQPLSLRPEACRPAAGGAVHTRGLDFACDIYIWAPLAGTCGVLLLSLVITLYCKRGRKKLLYIFKQPFMRPVQTTQEEDGCSCRFPEEEEGGCELRVKFSRSADAPAYQQGQNQLYNELNLGRREEYDVLDKRRGRDPEMGGKPRRKNPQEGLYNELQKDKMAEAYSEIGMKGERRRGKGHDGLYQGLSTATKDTYDALHMQALPPR

SEQ ID NO: 834 - protein, 373 aa, synthetic construct
MALPVTALLLPLALLLHAARPQVQLVESGGGLVQPGGSLRLSCAASGSIFSVNDMGWYRQAPGKQRELVAAIYSGGSTNYADSVKGRFTISRDNAKNTVYLQMNSLKPEDTAVYYCNADIVVVTTTPPSFPMPYRFLEVWGQGTLVTVSSTTTPAPRPPTPAPTIASQPLSLRPEACRPAAGGAVHTRGLDFACDIYIWAPLAGTCGVLLLSLVITLYCKRGRKKLLYIFKQPFMRPVQTTQEEDGCSCRFPEEEEGGCELRVKFSRSADAPAYQQGQNQLYNELNLGRREEYDVLDKRRGRDPEMGGKPRRKNPQEGLYNELQKDKMAEAYSEIGMKGERRRGKGHDGLYQGLSTATKDTYDALHMQALPPR

SEQ ID NO: 835 - protein, 368 aa, synthetic construct
MALPVTALLLPLALLLHAARPQVQLVESGGGLVQPGGSLRLSCAASGSTFNTMAWFRQAPGKEREFVAAISWSGGLTYYGDSVKGRFTIFRDNAKNLGYLQMNSLKPEDTAVYSCAARTTFRTGLIVTVTAYDTWGQGTQVTVSSTTTPAPRPPTPAPTIASQPLSLRPEACRPAAGGAVHTRGLDFACDIYIWAPLAGTCGVLLLSLVITLYCKRGRKKLLYIFKQPFMRPVQTTQEEDGCSCRFPEEEEGGCELRVKFSRSADAPAYQQGQNQLYNELNLGRREEYDVLDKRRGRDPEMGGKPRRKNPQEGLYNELQKDKMAEAYSEIGMKGERRRGKGHDGLYQGLSTATKDTYDALHMQALPPR

SEQ ID NO: 836 - protein, 367 aa, synthetic construct
MALPVTALLLPLALLLHAARPQVQLVESGGGLVQPGGSLRLSCVLSGRTFSSYAMGWFRQAPGKEREFVSTISLSGGSTFYSGSAKGRFTISRDNAKNTVYLQMNSLKPEDTAVYYCAARPVLISRSSTDYAYWGPGTQVTVSSTTTPAPRPPTPAPTIASQPLSLRPEACRPAAGGAVHTRGLDFACDIYIWAPLAGTCGVLLLSLVITLYCKRGRKKLLYIFKQPFMRPVQTTQEEDGCSCRFPEEEEGGCELRVKFSRSADAPAYQQGQNQLYNELNLGRREEYDVLDKRRGRDPEMGGKPRRKNPQEGLYNELQKDKMAEAYSEIGMKGERRRGKGHDGLYQGLSTATKDTYDALHMQALPPR

SEQ ID NO: 837 - protein, 367 aa, synthetic construct; identical to SEQ ID NO: 836

SEQ ID NO: 838 - protein, 368 aa, synthetic construct
MALPVTALLLPLALLLHAARPQVQLVESGGGLVQTGGSLRLSCAASGRTFSSYAMGWFRQAPGKEREFVAAITWSGGSTYYANSVKGRFTISRDNAKNTVDLQMNSLKPEDTAVYYCTPGEEVAGKYFRPLYDYWGQGTQVTVSSTTTPAPRPPTPAPTIASQPLSLRPEACRPAAGGAVHTRGLDFACDIYIWAPLAGTCGVLLLSLVITLYCKRGRKKLLYIFKQPFMRPVQTTQEEDGCSCRFPEEEEGGCELRVKFSRSADAPAYQQGQNQLYNELNLGRREEYDVLDKRRGRDPEMGGKPRRKNPQEGLYNELQKDKMAEAYSEIGMKGERRRGKGHDGLYQGLSTATKDTYDALHMQALPPR

SEQ ID NO: 839 - protein, 360 aa, synthetic construct
MALPVTALLLPLALLLHAARPQVQLVESGGGLVQVGGSLRLSCSISRSIAIFNFMAWYREAEGKQRELVASITGGSRLSYIDSVKGRFTVSKDTANNTLDLQMNSLRPEDTAVYRCAASSPFAGEFWGQGTQVTVSSTTTPAPRPPTPAPTIASQPLSLRPEACRPAAGGAVHTRGLDFACDIYIWAPLAGTCGVLLLSLVITLYCKRGRKKLLYIFKQPFMRPVQTTQEEDGCSCRFPEEEEGGCELRVKFSRSADAPAYQQGQNQLYNELNLGRREEYDVLDKRRGRDPEMGGKPRRKNPQEGLYNELQKDKMAEAYSEIGMKGERRRGKGHDGLYQGLSTATKDTYDALHMQALPPR

SEQ ID NO: 840 - protein, 368 aa, synthetic construct
MALPVTALLLPLALLLHAARPQVQLVESGGRLVQAGGSLRLSCAASGRTFNTMAWFRQAPGKEREFVAAITWSGGLTYYEDSVKGRFTIFRDNAKNLAYLQLNSLKPEDTAVYSCAARSTFRTALVNTVTAYDTWGQGTQVTVSSTTTPAPRPPTPAPTIASQPLSLRPEACRPAAGGAVHTRGLDFACDIYIWAPLAGTCGVLLLSLVITLYCKRGRKKLLYIFKQPFMRPVQTTQEEDGCSCRFPEEEEGGCELRVKFSRSADAPAYQQGQNQLYNELNLGRREEYDVLDKRRGRDPEMGGKPRRKNPQEGLYNELQKDKMAEAYSEIGMKGERRRGKGHDGLYQGLSTATKDTYDALHMQALPPR

SEQ ID NO: 841 - protein, 360 aa, synthetic construct
MALPVTALLLPLALLLHAARPQVQLVESGGGLVQPGGSLRLSCTASGRTIASTIMGWYRQTPGKEREFVAISARSGDSESYASSVKDRFTISRDNAKNTVYLQMNNLKPEDTAIYYCYWNTGAGTIWGQGTQVTVSSTTTPAPRPPTPAPTIASQPLSLRPEACRPAAGGAVHTRGLDFACDIYIWAPLAGTCGVLLLSLVITLYCKRGRKKLLYIFKQPFMRPVQTTQEEDGCSCRFPEEEEGGCELRVKFSRSADAPAYQQGQNQLYNELNLGRREEYDVLDKRRGRDPEMGGKPRRKNPQEGLYNELQKDKMAEAYSEIGMKGERRRGKGHDGLYQGLSTATKDTYDALHMQALPPR

SEQ ID NO: 842 - protein, 368 aa, synthetic construct; identical to SEQ ID NO: 835

SEQ ID NO: 843 - protein, 367 aa, synthetic construct; identical to SEQ ID NO: 836

SEQ ID NO: 844 - protein, 368 aa, synthetic construct; identical to SEQ ID NO: 838

SEQ ID NO: 845 - protein, 360 aa, synthetic construct; identical to SEQ ID NO: 839

SEQ ID NO: 846 - protein, 368 aa, synthetic construct; identical to SEQ ID NO: 840

SEQ ID NO: 847 - protein, 360 aa, synthetic construct; identical to SEQ ID NO: 841

SEQ ID NO: 848 - DNA, 381 bp, synthetic construct; identical to SEQ ID NO: 483
  source 1..381: mol_type = other DNA

SEQ ID NO: 849 - DNA, 381 bp, synthetic construct; identical to SEQ ID NO: 484
  source 1..381: mol_type = other DNA

SEQ ID NO: 850 - DNA, 381 bp, synthetic construct; identical to SEQ ID NO: 485
  source 1..381: mol_type = other DNA

SEQ ID NO: 851 - DNA, 357 bp, synthetic construct; identical to SEQ ID NO: 486
  source 1..357: mol_type = other DNA

SEQ ID NO: 852 - DNA, 360 bp, synthetic construct; identical to SEQ ID NO: 487
  source 1..360: mol_type = other DNA

SEQ ID NO: 853 - DNA, 363 bp, synthetic construct; identical to SEQ ID NO: 488
  source 1..363: mol_type = other DNA

SEQ ID NO: 854 - DNA, 363 bp, synthetic construct; identical to SEQ ID NO: 489
  source 1..363: mol_type = other DNA

SEQ ID NO: 855 - DNA, 363 bp, synthetic construct; identical to SEQ ID NO: 490
  source 1..363: mol_type = other DNA

SEQ ID NO: 856 - DNA, 363 bp, synthetic construct; identical to SEQ ID NO: 491
  source 1..363: mol_type = other DNA

SEQ ID NO: 857 - DNA, 372 bp, synthetic construct; identical to SEQ ID NO: 492
  source 1..372: mol_type = other DNA

SEQ ID NO: 858 - DNA, 372 bp, synthetic construct; identical to SEQ ID NO: 493
  source 1..372: mol_type = other DNA

SEQ ID NO: 859 - DNA, 372 bp, synthetic construct; identical to SEQ ID NO: 494
  source 1..372: mol_type = other DNA

SEQ ID NO: 860 - DNA, 348 bp, synthetic construct; identical to SEQ ID NO: 495
  source 1..348: mol_type = other DNA

SEQ ID NO: 861 - DNA, 354 bp, synthetic construct; identical to SEQ ID NO: 496
  source 1..354: mol_type = other DNA

SEQ ID NO: 862 - DNA, 363 bp, synthetic construct; identical to SEQ ID NO: 497
  source 1..363: mol_type = other DNA

SEQ ID NO: 863 - DNA, 366 bp, synthetic construct; identical to SEQ ID NO: 498
  source 1..366: mol_type = other DNA

SEQ ID NO: 864 - DNA, 372 bp, synthetic construct; identical to SEQ ID NO: 499
  source 1..372: mol_type = other DNA

SEQ ID NO: 865 - DNA, 339 bp, synthetic construct; identical to SEQ ID NO: 500
  source 1..339: mol_type = other DNA

SEQ ID NO: 866 - DNA, 354 bp, synthetic construct; identical to SEQ ID NO: 501
  source 1..354: mol_type = other DNA

SEQ ID NO: 867 - DNA, 366 bp, synthetic construct; identical to SEQ ID NO: 502
  source 1..366: mol_type = other DNA

SEQ ID NO: 868 - DNA, 354 bp, synthetic construct; identical to SEQ ID NO: 503
  source 1..354: mol_type = other DNA

SEQ ID NO: 869 - DNA, 369 bp, synthetic construct; identical to SEQ ID NO: 504
  source 1..369: mol_type = other DNA

SEQ ID NO: 870 - DNA, 369 bp, synthetic construct; identical to SEQ ID NO: 505
  source 1..369: mol_type = other DNA

SEQ ID NO: 871 - DNA, 372 bp, synthetic construct; identical to SEQ ID NO: 506
  source 1..372: mol_type = other DNA

SEQ ID NO: 872 - DNA, 354 bp, synthetic construct; identical to SEQ ID NO: 507
  source 1..354: mol_type = other DNA

SEQ ID NO: 873 - DNA, 363 bp, synthetic construct; identical to SEQ ID NO: 508
  source 1..363: mol_type = other DNA

SEQ ID NO: 874 - DNA, 387 bp, synthetic construct; identical to SEQ ID NO: 509
  source 1..387: mol_type = other DNA

SEQ ID NO: 875 - DNA, 372 bp, synthetic construct; identical to SEQ ID NO: 510
  source 1..372: mol_type = other DNA

SEQ ID NO: 876 - DNA, 372 bp, synthetic construct; identical to SEQ ID NO: 511
  source 1..372: mol_type = other DNA

SEQ ID NO: 877 - DNA, 354 bp, synthetic construct; identical to SEQ ID NO: 512
  source 1..354: mol_type = other DNA

SEQ ID NO: 878 - DNA, 378 bp, synthetic construct; identical to SEQ ID NO: 513
  source 1..378: mol_type = other DNA

SEQ ID NO: 879 - DNA, 357 bp, synthetic construct; identical to SEQ ID NO: 514
  source 1..357: mol_type = other DNA

SEQ ID NO: 880 - DNA, 357 bp, synthetic construct; identical to SEQ ID NO: 515
  source 1..357: mol_type = other DNA

SEQ ID NO: 881 - DNA, 354 bp, synthetic construct; identical to SEQ ID NO: 516
  source 1..354: mol_type = other DNA

SEQ ID NO: 882 - DNA, 354 bp, synthetic construct; identical to SEQ ID NO: 517
  source 1..354: mol_type = other DNA

SEQ ID NO: 883 - DNA, 354 bp, synthetic construct; identical to SEQ ID NO: 518
  source 1..354: mol_type = other DNA

SEQ ID NO: 884 - DNA, 354 bp, synthetic construct; identical to SEQ ID NO: 519
  source 1..354: mol_type = other DNA

SEQ ID NO: 885 - DNA, 354 bp, synthetic construct; identical to SEQ ID NO: 520
  source 1..354: mol_type = other DNA

SEQ ID NO: 886 - DNA, 354 bp, synthetic construct; identical to SEQ ID NO: 521
  source 1..354: mol_type = other DNA

SEQ ID NO: 887 - DNA, 357 bp, synthetic construct; identical to SEQ ID NO: 522
  source 1..357: mol_type = other DNA

SEQ ID NO: 888 - DNA, 369 bp, synthetic construct; identical to SEQ ID NO: 523
  source 1..369: mol_type = other DNA

SEQ ID NO: 889 - DNA, 366 bp, synthetic construct; identical to SEQ ID NO: 524
  source 1..366: mol_type = other DNA

SEQ ID NO: 890 - DNA, 372 bp, synthetic construct; identical to SEQ ID NO: 525
  source 1..372: mol_type = other DNA

SEQ ID NO: 891 - DNA, 372 bp, synthetic construct; identical to SEQ ID NO: 526
  source 1..372: mol_type = other DNA

SEQ ID NO: 892 - DNA, 372 bp, synthetic construct; identical to SEQ ID NO: 527
  source 1..372: mol_type = other DNA

SEQ ID NO: 893 - DNA, 372 bp, synthetic construct; identical to SEQ ID NO: 528
  source 1..372: mol_type = other DNA

SEQ ID NO: 894 - DNA, 345 bp, synthetic construct; identical to SEQ ID NO: 529
  source 1..345: mol_type = other DNA

SEQ ID NO: 895 - DNA, 348 bp, synthetic construct; identical to SEQ ID NO: 530
  source 1..348: mol_type = other DNA

SEQ ID NO: 896 - DNA, 351 bp, synthetic construct; identical to SEQ ID NO: 531
  source 1..351: mol_type = other DNA

SEQ ID NO: 897 - DNA, 372 bp, synthetic construct; identical to SEQ ID NO: 532
  source 1..372: mol_type = other DNA

SEQ ID NO: 898 - DNA, 369 bp, synthetic construct; identical to SEQ ID NO: 533
  source 1..369: mol_type = other DNA

SEQ ID NO: 899 - DNA, 369 bp, synthetic construct; identical to SEQ ID NO: 534
  source 1..369: mol_type = other DNA

SEQ ID NO: 900 - DNA, 372 bp, synthetic construct; identical to SEQ ID NO: 535
  source 1..372: mol_type = other DNA

SEQ ID NO: 901 - DNA, 348 bp, synthetic construct; identical to SEQ ID NO: 536
  source 1..348: mol_type = other DNA

SEQ ID NO: 902 - DNA, 372 bp, synthetic construct; identical to SEQ ID NO: 537
  source 1..372: mol_type = other DNA

SEQ ID NO: 903 - DNA, 348 bp, synthetic construct; identical to SEQ ID NO: 538
  source 1..348: mol_type = other DNA

SEQ ID NO: 904 - DNA, 1113 bp, synthetic construct
  source 1..1113: mol_type = other DNA
atggccctgcccgttaccgccctactcctgcccctggccctcctgctccacgccgccaggcccgaggtgcaattggtcgagagcggtggcgggttggttcaaccaggtggttctttgcggctgtcatgtgcagcctctggctttgctctggacggatacacaatagggtggtttcgccaagctccgggtaaagagcgggagggagtggcatgtatcagtcgatctgatacttccacgaagtacgcagattcagttaaggggaggtttacgattagtcgagataacgccaaaagaactgtctctcttcaaatgaactctctcaagccggaggacacggcggtttattattgtgccgcctcacttcaatctggactgctttccagatttctcttgcctcgccagtatgaccactggggacagggtactcaggttactgttagcagcaccaccacccctgcccccaggccccccacccccgcccccaccatcgccagccagcccctgtccctgcggcccgaggcctgccggcccgccgccggcggcgccgtgcacacccggggcctggacttcgcctgcgacatctacatctgggcccccctggccggaacctgcggcgtgctgctgctgtccctggtgatcaccctgtactgcaagcggggccggaagaagctgctgtacatcttcaagcagcccttcatgcgccccgtgcagaccacccaggaggaggacggctgcagctgcaggttccccgaggaggaggaggggggctgcgagctgcgggtgaagttcagcaggagcgccgacgcccctgcttaccagcagggccagaatcagctgtacaacgagctgaatctgggccggagggaggagtacgacgtgctggacaagcggaggggcagggaccccgagatgggcggcaagcccaggcggaagaacccccaggaggggctgtacaacgagctgcagaaggacaagatggccgaggcctactccgagatcggcatgaagggcgagaggcggagaggcaagggccatgacggcctgtaccagggcctgtccaccgccaccaaggacacctacgacgccctgcacatgcaggccctgcccccccgc

SEQ ID NO: 905 - DNA, 1113 bp, synthetic construct
  source 1..1113: mol_type = other DNA
atggccctgcccgttaccgccctactcctgcccctggccctcctgctccacgccgccaggccccaacttcaactcgttgagtcaggaggggggctcgtccagcctggaggtagtctgcggctctcctgcgtagcttccggttttgcacttgactcatatactattgggtggttccggcaagcaccaggtaaagaacgggaggggctttcctgtatatccaggtcaacctccgatgctagatatgcggactctgttaaaggacggttcacgatatctcgggataatgcgaagactaccgtaagcctgttgatgagctccctcaaacccgaggacactgccgtctattattgcgctgccagtagacaaactggcctcctctccactttccttcttccgcgccagtacgatcactggggccagggaacgcaagtaactgtctccagcaccaccacccctgcccccaggccccccacccccgcccccaccatcgccagccagcccctgtccctgcggcccgaggcctgccggcccgccgccggcggcgccgtgcacacccggggcctggacttcgcctgcgacatctacatctgggcccccctggccggaacctgcggcgtgctgctgctgtccctggtgatcaccctgtactgcaagcggggccggaagaagctgctgtacatcttcaagcagcccttcatgcgccccgtgcagaccacccaggaggaggacggctgcagctgcaggttccccgaggaggaggaggggggctgcgagctgcgggtgaagttcagcaggagcgccgacgcccctgcttaccagcagggccagaatcagctgtacaacgagctgaatctgggccggagggaggagtacgacgtgctggacaagcggaggggcagggaccccgagatgggcggcaagcccaggcggaagaacccccaggaggggctgtacaacgagctgcagaaggacaagatggccgaggcctactccgagatcggcatgaagggcgagaggcggagaggcaagggccatgacggcctgtaccagggcctgtccaccgccaccaaggacacctacgacgccctgcacatgcaggccctgcccccccgc

SEQ ID NO: 906 - DNA, 1113 bp, synthetic construct
  source 1..1113: mol_type = other DNA
atggccctgcccgttaccgccctactcctgcccctggccctcctgctccacgccgccaggccccaagttcaactggttgaaagtggtggcggcttggttcagccgggcgggtcccttcgcctttcatgtgcagcgtcaggcttttcccttgacttttattcaatcggatggttcagacaagcccctggtaaagaaagggaaggagtctcttgtataacatggtcaggagagcgaacgaattacaaggatagcgtaaaaggtcgattcacaataagcagggacgatgctaaggcgacggtttttttgcagatgaataatctgaaaccggaagatacagcagtctactactgtgcagcggattctggctacccgtgttatgggtcctcctggtcctctgtaggctatgatttttggggccaggggacgcaagttacagtctcttcaaccaccacccctgcccccaggccccccacccccgcccccaccatcgccagccagcccctgtccctgcggcccgaggcctgccggcccgccgccggcggcgccgtgcacacccggggcctggacttcgcctgcgacatctacatctgggcccccctggccggaacctgcggcgtgctgctgctgtccctggtgatcaccctgtactgcaagcggggccggaagaagctgctgtacatcttcaagcagcccttcatgcgccccgtgcagaccacccaggaggaggacggctgcagctgcaggttccccgaggaggaggaggggggctgcgagctgcgggtgaagttcagcaggagcgccgacgcccctgcttaccagcagggccagaatcagctgtacaacgagctgaatctgggccggagggaggagtacgacgtgctggacaagcggaggggcagggaccccgagatgggcggcaagcccaggcggaagaacccccaggaggggctgtacaacgagctgcagaaggacaagatggccgaggcctactccgagatcggcatgaagggcgagaggcggagaggcaagggccatgacggcctgtaccagggcctgtccaccgccaccaaggacacctacgacgccctgcacatgcaggccctgcccccccgc

SEQ ID NO: 907 - DNA, 1089 bp, synthetic construct
  source 1..1089: mol_type = other DNA
atggccctgcccgttaccgccctactcctgcccctggccctcctgctccacgccgccaggccccaggtgcaactcgttgaaagcggtggagggagtgtggaacccggcgggagcctcagattgagctgcgccacctctgggcttatcctcagtaatcacggcatggggtgggccagacaggttcccggcaaagaagttgaatgggtttccggaagctacaccgacggaagcacgtattatgcggatagtgttaagggccgctttaccattagccgggataatgtcaagaatacagtttatcttcaaatgaatagtcttaaacccgaagacactgccgtctactactgtgccgcaaggcaatattatcgctccggctatgtggactattgggggcaaggaacccaagtgacggtgtcatctaccaccacccctgcccccaggccccccacccccgcccccaccatcgccagccagcccctgtccctgcggcccgaggcctgccggcccgccgccggcggcgccgtgcacacccggggcctggacttcgcctgcgacatctacatctgggcccccctggccggaacctgcggcgtgctgctgctgtccctggtgatcaccctgtactgcaagcggggccggaagaagctgctgtacatcttcaagcagcccttcatgcgccccgtgcagaccacccaggaggaggacggctgcagctgcaggttccccgaggaggaggaggggggctgcgagctgcgggtgaagttcagcaggagcgccgacgcccctgcttaccagcagggccagaatcagctgtacaacgagctgaatctgggccggagggaggagtacgacgtgctggacaagcggaggggcagggaccccgagatgggcggcaagcccaggcggaagaacccccaggaggggctgtacaacgagctgcagaaggacaagatggccgaggcctactccgagatcggcatgaagggcgagaggcggagaggcaagggccatgacggcctgtaccagggcctgtccaccgccaccaaggacacctacgacgccctgcacatgcaggccctgcccccccgc

SEQ ID NO: 908 - DNA, 1092 bp, synthetic construct
  source 1..1092: mol_type = other DNA
atggccctgcccgttaccgccctactcctgcccctggccctcctgctccacgccgccaggccccaggtccaactggtagaaagcggcggaggcaaagtgcaacccggaggttcccttcggctttcatgtgccgcgagcggatttacgttttccaactacggtatgatgtgggtgagacaagctccaggcaaagggttggagtgggttagctatattgacagcggcggtggatccacctactacaccgactctgtacgagggaggtttacaattagtagagacaacgctaaaaacacagtctacctccaaatgaatagtctcaagccagaggacacagccgtgtactactgcgcaaaagcgataggtgttgtctctggctccttggaagtatggggacaagggacgctggtcacagtaagctctaccaccacccctgcccccaggccccccacccccgcccccaccatcgccagccagcccctgtccctgcggcccgaggcctgccggcccgccgccggcggcgccgtgcacacccggggcctggacttcgcctgcgacatctacatctgggcccccctggccggaacctgcggcgtgctgctgctgtccctggtgatcaccctgtactgcaagcggggccggaagaagctgctgtacatcttcaagcagcccttcatgcgccccgtgcagaccacccaggaggaggacggctgcagctgcaggttccccgaggaggaggaggggggctgcgagctgcgggtgaagttcagcaggagcgccgacgcccctgcttaccagcagggccagaatcagctgtacaacgagctgaatctgggccggagggaggagtacgacgtgctggacaagcggaggggcagggaccccgagatgggcggcaagcccaggcggaagaacccccaggaggggctgtacaacgagctgcagaaggacaagatggccgaggcctactccgagatcggcatgaagggcgagaggcggagaggcaagggccatgacggcctgtaccagggcctgtccaccgccaccaaggacacctacgacgccctgcacatgcaggccctgcccccccgc

SEQ ID NO: 909 - DNA, 1095 bp, synthetic construct
  source 1..1095: mol_type = other DNA
atggccctgcccgttaccgccctactcctgcccctggccctcctgctccacgccgccaggccccaggttcagcttgttgaaagcggaggaggactggttcaggcagggggcagcttgcgactctcatgcgccgccagcgggcggaccttcacaagttatgctatggggtggtttagacaagcaccgggaaaagagagagaattcgtagcagccatttcatggcggggcgtaaatacctattatgccgatagcgtgaaaggaaggtttaccattagcagagaaaacgcaaaaaatacggtgtacttgcaaatgatcagtctgaagccggaggatacagcggtgtattactgtgccgcaggtccattgggcgcgaccatgtctgagatcggttcttgggggcaggggacacaagtcaccgtgtcttccaccaccacccctgcccccaggccccccacccccgcccccaccatcgccagccagcccctgtccctgcggcccgaggcctgccggcccgccgccggcggcgccgtgcacacccggggcctggacttcgcctgcgacatctacatctgggcccccctggccggaacctgcggcgtgctgctgctgtccctggtgatcaccctgtactgcaagcggggccggaagaagctgctgtacatcttcaagcagcccttcatgcgccccgtgcagaccacccaggaggaggacggctgcagctgcaggttccccgaggaggaggaggggggctgcgagctgcgggtgaagttcagcaggagcgccgacgcccctgcttaccagcagggccagaatcagctgtacaacgagctgaatctgggccggagggaggagtacgacgtgctggacaagcggaggggcagggaccccgagatgggcggcaagcccaggcggaagaacccccaggaggggctgtacaacgagctgcagaaggacaagatggccgaggcctactccgagatcggcatgaagggcgagaggcggagaggcaagggccatgacggcctgtaccagggcctgtccaccgccaccaaggacacctacgacgccctgcacatgcaggccctgcccccccgc

SEQ ID NO: 910 - DNA, 1095 bp, synthetic construct
  source 1..1095: mol_type = other DNA
atggccctgcccgttaccgccctactcctgcccctggccctcctgctccacgccgccaggcccgaggtgcagttggttgaatccgggggagggcttgtccaagctggaggttctctcagactcagttgtgcagctagtggacgcacctttagtaactatgctatgggatggttccgccaggctcctggtaaagaacgagagttcgtatcagcgatttcttggtccggtgggtccacctattacgcggacagcgtcaaaggtcgatttaccatttctcgagataatgcgaaaaataccgtctatctgcaaatgatatctctcaagcccgaggatactgctgtgtactattgcgcggctggtccgctcggagcaacaatgtcagaaattggaagttggggccaagggacgcaagttaccgtatcctctaccaccacccctgcccccaggccccccacccccgcccccaccatcgccagccagcccctgtccctgcggcccgaggcctgccggcccgccgccggcggcgccgtgcacacccggggcctggacttcgcctgcgacatctacatctgggcccccctggccggaacctgcggcgtgctgctgctgtccctggtgatcaccctgtactgcaagcggggccggaagaagctgctgtacatcttcaagcagcccttcatgcgccccgtgcagaccacccaggaggaggacggctgcagctgcaggttccccgaggaggaggaggggggctgcgagctgcgggtgaagttcagcaggagcgccgacgcccctgcttaccagcagggccagaatcagctgtacaacgagctgaatctgggccggagggaggagtacgacgtgctggacaagcggaggggcagggaccccgagatgggcggcaagcccaggcggaagaacccccaggaggggctgtacaacgagctgcagaaggacaagatggccgaggcctactccgagatcggcatgaagggcgagaggcggagaggcaagggccatgacggcctgtaccagggcctgtccaccgccaccaaggacacctacgacgccctgcacatgcaggccctgcccccccgc

SEQ ID NO: 911 - DNA, 1095 bp, synthetic construct
  source 1..1095: mol_type = other DNA
atggccctgcccgttaccgccctactcctgcccctggccctcctgctccacgccgccaggccccaagttcaattggtcgaaagtggaggcggcttggtacaagcgggtggatcactgagacttagctgcgctgcctcaggtaggaccgtgtcaagttatgctatgggctggttcaggcaggcgcctggcaaggaacgagaatttgtcgccgcaatttcatggtccggcggaggcacttactatgctgattccgtcaagggccggtttactatcagccgggataacgcaaaaaacacggtgtacctgcaaatgatttccctgaagcccgaagatacagcagtgtattattgtgcggcgggaccgcttggtgcgacgatgagtgagatcgggagctggggacagggcacacaagtaacggtgtccagcaccaccacccctgcccccaggccccccacccccgcccccaccatcgccagccagcccctgtccctgcggcccgaggcctgccggcccgccgccggcggcgccgtgcacacccggggcctggacttcgcctgcgacatctacatctgggcccccctggccggaacctgcggcgtgctgctgctgtccctggtgatcaccctgtactgcaagcggggccggaagaagctgctgtacatcttcaagcagcccttcatgcgccccgtgcagaccacccaggaggaggacggctgcagctgcaggttccccgaggaggaggaggggggctgcgagctgcgggtgaagttcagcaggagcgccgacgcccctgcttaccagcagggccagaatcagctgtacaacgagctgaatctgggccggagggaggagtacgacgtgctggacaagcggaggggcagggaccccgagatgggcggcaagcccaggcggaagaacccccaggaggggctgtacaacgagctgcagaaggacaagatggccgaggcctactccgagatcggcatgaagggcgagaggcggagaggcaagggccatgacggcctgtaccagggcctgtccaccgccaccaaggacacctacgacgccctgcacatgcaggccctgcccccccgc

SEQ ID NO: 912 - DNA, 1095 bp, synthetic construct
  source 1..1095: mol_type = other DNA
atggccctgcccgttaccgccctactcctgcccctggccctcctgctccacgccgccaggccccaagtccaacttgttgaatctgggggtgggctcgtgcaagctggggggagtcttcggttgtcatgcgccgcgtcaggacgcactgtatcaagctacgccatgggatggtttaggcaggcacctggtaaggagcgggagttcgtcgcggcgatttcctggtcaggtggaagcacgtactacgcagactcagtgaaaggtagattcacgatctcacgggataatgccaaaaataccgtctacctccagatgatctctcttaaacctgaagatacagccgtgtactattgcgccgctgggccactcggtgctacgatgagtgaaattgggagttggggccagggcacgcaggtcactgtttcaagcaccaccacccctgcccccaggccccccacccccgcccccaccatcgccagccagcccctgtccctgcggcccgaggcctgccggcccgccgccggcggcgccgtgcacacccggggcctggacttcgcctgcgacatctacatctgggcccccctggccggaacctgcggcgtgctgctgctgtccctggtgatcaccctgtactgcaagcggggccggaagaagctgctgtacatcttcaagcagcccttcatgcgccccgtgcagaccacccaggaggaggacggctgcagctgcaggttccccgaggaggaggaggggggctgcgagctgcgggtgaagttcagcaggagcgccgacgcccctgcttaccagcagggccagaatcagctgtacaacgagctgaatctgggccggagggaggagtacgacgtgctggacaagcggaggggcagggaccccgagatgggcggcaagcccaggcggaagaacccccaggaggggctgtacaacgagctgcagaaggacaagatggccgaggcctactccgagatcggcatgaagggcgagaggcggagaggcaagggccatgacggcctgtaccagggcctgtccaccgccaccaaggacacctacgacgccctgcacatgcaggccctgcccccccgc

SEQ ID NO: 913 - DNA, 1104 bp, synthetic construct
  source 1..1104: mol_type = other DNA
atggccctgcccgttaccgccctactcctgcccctggccctcctgctccacgccgccaggcccgaagttcagttggtagaatctggcggtggcctggctcaacctgggggatcactcagactcagttgtgtagcgtccggctttgccttcggctccttcgctatagattgggtgcgacaaccgcccggaaagggacctgaatgggtatctgcgatcaaccggggaggggatcgcacatactatagtgatagcgtaaagggtcgatttacaatctcccgcgataacgccaagaatacactctatctgcaattgaacagtcttaaaccggaggacacggcggtttatctgtgtgctgctggagggcgcgtgtctgctgatggaaaaaagtgggagtacgactattggggtcagggcacgcaagtgaccgtatcttccaccaccacccctgcccccaggccccccacccccgcccccaccatcgccagccagcccctgtccctgcggcccgaggcctgccggcccgccgccggcggcgccgtgcacacccggggcctggacttcgcctgcgacatctacatctgggcccccctggccggaacctgcggcgtgctgctgctgtccctggtgatcaccctgtactgcaagcggggccggaagaagctgctgtacatcttcaagcagcccttcatgcgccccgtgcagaccacccaggaggaggacggctgcagctgcaggttccccgaggaggaggaggggggctgcgagctgcgggtgaagttcagcaggagcgccgacgcccctgcttaccagcagggccagaatcagctgtacaacgagctgaatctgggccggagggaggagtacgacgtgctggacaagcggaggggcagggaccccgagatgggcggcaagcccaggcggaagaacccccaggaggggctgtacaacgagctgcagaaggacaagatggccgaggcctactccgagatcggcatgaagggcgagaggcggagaggcaagggccatgacggcctgtaccagggcctgtccaccgccaccaaggacacctacgacgccctgcacatgcaggccctgcccccccgc

SEQ ID NO: 914 - DNA, 1104 bp, synthetic construct
  source 1..1104: mol_type = other DNA
atggccctgcccgttaccgccctactcctgcccctggccctcctgctccacgccgccaggcccgaggtgcaacttgtcgagagcggaggaggtcttgttcatgcgggaggttctctgcgcctgagctgcgccgcgagcggacggacattcaataccatggcttggttccggcaggcgcctggcaaggagagagaattcgtagccgccatagcatggaattcaggtcttacctactatggggacagtgtaaaggggcgcttcaccatctttcgagacaatgcgaagaatctggcctacctccagatgaactccttgaaacctgaggatactgcggtctattcctgcgctgcacgacggacgttccgcaccggactgatcaacactgtcaccgcgtatgatacatggggtcaggggacacaagtcaccgtctcatcaaccaccacccctgcccccaggccccccacccccgcccccaccatcgccagccagcccctgtccctgcggcccgaggcctgccggcccgccgccggcggcgccgtgcacacccggggcctggacttcgcctgcgacatctacatctgggcccccctggccggaacctgcggcgtgctgctgctgtccctggtgatcaccctgtactgcaagcggggccggaagaagctgctgtacatcttcaagcagcccttcatgcgccccgtgcagaccacccaggaggaggacggctgcagctgcaggttccccgaggaggaggaggggggctgcgagctgcgggtgaagttcagcaggagcgccgacgcccctgcttaccagcagggccagaatcagctgtacaacgagctgaatctgggccggagggaggagtacgacgtgctggacaagcggaggggcagggaccccgagatgggcggcaagcccaggcggaagaacccccaggaggggctgtacaacgagctgcagaaggacaagatggccgaggcctactccgagatcggcatgaagggcgagaggcggagaggcaagggccatgacggcctgtaccagggcctgtccaccgccaccaaggacacctacgacgccctgcacatgcaggccctgcccccccgc

SEQ ID NO: 915 - DNA, 1104 bp, synthetic construct
  source 1..1104: mol_type = other DNA
atggccctgcccgttaccgccctactcctgcccctggccctcctgctccacgccgccaggcccgaagtacaacttgtcgagagcggcggcgggctcgtacatgctggcggctcattgcgccttagctgcgtagcaagcgggaggacttttaacactatggcctggtttagacaagctcctggtaaagaaagagaatttgtcgcggcaatttcctggagcggagggctcacgtactacggggatagcgttaaggggcgattcacgatattcagagacaacgctaaaaacctggcctaccttcaaatgaatagcttgaaaccagaagacactgccgtatattcatgtgcagcccgccggacgttccggacagccctcatcaacactatcacagcctatgatacctggggtcaaggaactcaagtgactgtcagctccaccaccacccctgcccccaggccccccacccccgcccccaccatcgccagccagcccctgtccctgcggcccgaggcctgccggcccgccgccggcggcgccgtgcacacccggggcctggacttcgcctgcgacatctacatctgggcccccctggccggaacctgcggcgtgctgctgctgtccctggtgatcaccctgtactgcaagcggggccggaagaagctgctgtacatcttcaagcagcccttcatgcgccccgtgcagaccacccaggaggaggacggctgcagctgcaggttccccgaggaggaggaggggggctgcgagctgcgggtgaagttcagcaggagcgccgacgcccctgcttaccagcagggccagaatcagctgtacaacgagctgaatctgggccggagggaggagtacgacgtgctggacaagcggaggggcagggaccccgagatgggcggcaagcccaggcggaagaacccccaggaggggctgtacaacgagctgcagaaggacaagatggccgaggcctactccgagatcggcatgaagggcgagaggcggagaggcaagggccatgacggcctgtaccagggcctgtccaccgccaccaaggacacctacgacgccctgcacatgcaggccctgcccccccgc

SEQ ID NO: 916 - DNA, 1080 bp, synthetic construct
  source 1..1080: mol_type = other DNA
atggccctgcccgttaccgccctactcctgcccctggccctcctgctccacgccgccaggcccgaagttcaactcgtcgagtcaggtggtggccttgtccaagccgggggaagcctccgattgtcttgcgctgcaagtgggaatattgttgatatagacgacatgggatggtaccggcaggcacctggacgcgacttggtcgcttctataacggctggcgggattacaaagtacgctgattcagcgaagggcaggttcactatctcccgcgataacgttaaaaacaccgtgtatctgcaaatgaacagtcttaaacctgaagatacggcgacgtactactgttatgcagtgagacggtactaccctcgatttgattattggggccagggcacacaagtgacagtgtccagtaccaccacccctgcccccaggccccccacccccgcccccaccatcgccagccagcccctgtccctgcggcccgaggcctgccggcccgccgccggcggcgccgtgcacacccggggcctggacttcgcctgcgacatctacatctgggcccccctggccggaacctgcggcgtgctgctgctgtccctggtgatcaccctgtactgcaagcggggccggaagaagctgctgtacatcttcaagcagcccttcatgcgccccgtgcagaccacccaggaggaggacggctgcagctgcaggttccccgaggaggaggaggggggctgcgagctgcgggtgaagttcagcaggagcgccgacgcccctgcttaccagcagggccagaatcagctgtacaacgagctgaatctgggccggagggaggagtacgacgtgctggacaagcggaggggcagggaccccgagatgggcggcaagcccaggcggaagaacccccaggaggggctgtacaacgagctgcagaaggacaagatggccgaggcctactccgagatcggcatgaagggcgagaggcggagaggcaagggccatgacggcctgtaccagggcctgtccaccgccaccaaggacacctacgacgccctgcacatgcaggccctgcccccccgc

SEQ ID NO: 917 - DNA, 1086 bp, synthetic construct
  source 1..1086: mol_type = other DNA
atggccctgcccgttaccgccctactcctgcccctggccctcctgctccacgccgccaggcccgaggttcaacttgtggaaagtggcggggggctcgtgcaagcgggtgggagcctccggctgtcttgcgcagccagcgggaacatcgttgaaatcgacgacatggggtggtatagacaagcaccaggaaaacagcgggaccttgttgccacaattacagctggaggcattacgaattatgcatcttcagctaaagggaggtttacgatctcccgagataacgtaaagaacacagtctatttgcaaatgaactccctgaaaccggaggataccgcaacgtactactgctatgccatacgaaagtattacccacgattcgattattggggtcaaggcactcaggtgaccgtgtcaagtaccaccacccctgcccccaggccccccacccccgcccccaccatcgccagccagcccctgtccctgcggcccgaggcctgccggcccgccgccggcggcgccgtgcacacccggggcctggacttcgcctgcgacatctacatctgggcccccctggccggaacctgcggcgtgctgctgctgtccctggtgatcaccctgtactgcaagcggggccggaagaagctgctgtacatcttcaagcagcccttcatgcgccccgtgcagaccacccaggaggaggacggctgcagctgcaggttccccgaggaggaggaggggggctgcgagctgcgggtgaagttcagcaggagcgccgacgcccctgcttaccagcagggccagaatcagctgtacaacgagctgaatctgggccggagggaggagtacgacgtgctggacaagcggaggggcagggaccccgagatgggcggcaagcccaggcggaagaacccccaggaggggctgtacaacgagctgcagaaggacaagatggccgaggcctactccgagatcggcatgaagggcgagaggcggagaggcaagggccatgacggcctgtaccagggcctgtccaccgccaccaaggacacctacgacgccctgcacatgcaggccctgcccccccgc

SEQ ID NO: 918 - DNA, 1095 bp, synthetic construct
  source 1..1095: mol_type = other DNA
atggccctgcccgttaccgccctactcctgcccctggccctcctgctccacgccgccaggcccgaggttcaactcgttgaaagtggaggagggctcgtccaggcgggcgggagtctgaggctttcttgcgccgcgagcggtagaactttccgatcctatgctatgggctggttcagacaggctcccggaaaagagagagaatttgtggcggccatatcttggtccggtgggcggatatactatgcagacagcgtcaaggggagattcacgataagccgagataatgcaaagaatacggtatacctgcagatgaactcccttaaacccgaggacaccgcagtatattattgtgccgctgatgattttgagaggaccatgacggaagtacggtattgggggcagggcactcaagtcaccgtgtcttcaaccaccacccctgcccccaggccccccacccccgcccccaccatcgccagccagcccctgtccctgcggcccgaggcctgccggcccgccgccggcggcgccgtgcacacccggggcctggacttcgcctgcgacatctacatctgggcccccctggccggaacctgcggcgtgctgctgctgtccctggtgatcaccctgtactgcaagcggggccggaagaagctgctgtacatcttcaagcagcccttcatgcgccccgtgcagaccacccaggaggaggacggctgcagctgcaggttccccgaggaggaggaggggggctgcgagctgcgggtgaagttcagcaggagcgccgacgcccctgcttaccagcagggccagaatcagctgtacaacgagctgaatctgggccggagggaggagtacgacgtgctggacaagcggaggggcagggaccccgagatgggcggcaagcccaggcggaagaacccccaggaggggctgtacaacgagctgcagaaggacaagatggccgaggcctactccgagatcggcatgaagggcgagaggcggagaggcaagggccatgacggcctgtaccagggcctgtccaccgccaccaaggacacctacgacgccctgcacatgcaggccctgcccccccgc

SEQ ID NO: 919 - DNA, 1098 bp, synthetic construct
  source 1..1098: mol_type = other DNA
atggccctgcccgttaccgccctactcctgcccctggccctcctgctccacgccgccaggcccgaggtgcaactggttgagagtggcgggggtcttgtccagccagggggatcacttaggctgtcatgtgcggctagcggctttaccttcagcgggtattacatgagttgggtccgccaggctccaggaaagggacttgagtgggtaagtagtatatatagcgatgattcaaacacttattatgcggattcagttaagggtagatttacgattagcagagataatgcaaagaacactgtctatctccaaatgaacagccttaaaccagaggacactgcagtttactattgtgcagcaagcgcgacacttagaggccgcgataccaggttcgattactggggccagggaacacaagtcactgtcagctccaccaccacccctgcccccaggccccccacccccgcccccaccatcgccagccagcccctgtccctgcggcccgaggcctgccggcccgccgccggcggcgccgtgcacacccggggcctggacttcgcctgcgacatctacatctgggcccccctggccggaacctgcggcgtgctgctgctgtccctggtgatcaccctgtactgcaagcggggccggaagaagctgctgtacatcttcaagcagcccttcatgcgccccgtgcagaccacccaggaggaggacggctgcagctgcaggttccccgaggaggaggaggggggctgcgagctgcgggtgaagttcagcaggagcgccgacgcccctgcttaccagcagggccagaatcagctgtacaacgagctgaatctgggccggagggaggagtacgacgtgctggacaagcggaggggcagggaccccgagatgggcggcaagcccaggcggaagaacccccaggaggggctgtacaacgagctgcagaaggacaagatggccgaggcctactccgagatcggcatgaagggcgagaggcggagaggcaagggccatgacggcctgtaccagggcctgtccaccgccaccaaggacacctacgacgccctgcacatgcaggccctgcccccccgc

SEQ ID NO: 920 - DNA, 1104 bp, synthetic construct
  source 1..1104: mol_type = other DNA
atggccctgcccgttaccgccctactcctgcccctggccctcctgctccacgccgccaggcccgaggttcaactcgtcgaatccggagggggattggtgcaacccggcggatcacttaggctttcctgtagtgcatctggcttccctttcgacgattacagtatggactgggtcaggcaggcaccggggaaaggcttggaatgggtgagtgccatcaacaggaacgggggatcaacgtattacgccgagtccatgaaggggaggttcacgatcagccgggataatgccaaaaacacgctgtatctccagatgtccagtcttaaaccagaagataccggggtctatctctgtgctgcggggggcagggtgtccgcagatggtaagaaatgggaatatgattattggggtcaggggacccaagttacggtttctagcaccaccacccctgcccccaggccccccacccccgcccccaccatcgccagccagcccctgtccctgcggcccgaggcctgccggcccgccgccggcggcgccgtgcacacccggggcctggacttcgcctgcgacatctacatctgggcccccctggccggaacctgcggcgtgctgctgctgtccctggtgatcaccctgtactgcaagcggggccggaagaagctgctgtacatcttcaagcagcccttcatgcgccccgtgcagaccacccaggaggaggacggctgcagctgcaggttccccgaggaggaggaggggggctgcgagctgcgggtgaagttcagcaggagcgccgacgcccctgcttaccagcagggccagaatcagctgtacaacgagctgaatctgggccggagggaggagtacgacgtgctggacaagcggaggggcagggaccccgagatgggcggcaagcccaggcggaagaacccccaggaggggctgtacaacgagctgcagaaggacaagatggccgaggcctactccgagatcggcatgaagggcgagaggcggagaggcaagggccatgacggcctgtaccagggcctgtccaccgccaccaaggacacctacgacgccctgcacatgcaggccctgcccccccgc

SEQ ID NO: 921 - DNA, 1071 bp, synthetic construct
  source 1..1071: mol_type = other DNA
atggccctgcccgttaccgccctactcctgcccctggccctcctgctccacgccgccaggccccaactccagctggtcgagtctggaggtggtttggtccaggctggggggagccttcgcctgtcatgcgctgcgagtgaccccatcgttaccttcaacactatgggatggtatagacaagcgcctggcaagcagagagaacttgttgcgagaattaccatgtctggcattcccaactacgcggattccgtaaaagggcggtttaccatatcccgagataacgcgaaaaatacgctgtatcttcaaatgaactctttgaagcccgaggatagtgccgtttactattgtcgagctgagcattctggctattgggggcagggaactcaggttactgtaagcagcaccaccacccctgcccccaggccccccacccccgcccccaccatcgccagccagcccctgtccctgcggcccgaggcctgccggcccgccgccggcggcgccgtgcacacccggggcctggacttcgcctgcgacatctacatctgggcccccctggccggaacctgcggcgtgctgctgctgtccctggtgatcaccctgtactgcaagcggggccggaagaagctgctgtacatcttcaagcagcccttcatgcgccccgtgcagaccacccaggaggaggacggctgcagctgcaggttccccgaggaggaggaggggggctgcgagctgcgggtgaagttcagcaggagcgccgacgcccctgcttaccagcagggccagaatcagctgtacaacgagctgaatctgggccggagggaggagtacgacgtgctggacaagcggaggggcagggaccccgagatgggcggcaagcccaggcggaagaacccccaggaggggctgtacaacgagctgcagaaggacaagatggccgaggcctactccgagatcggcatgaagggcgagaggcggagaggcaagggccatgacggcctgtaccagggcctgtccaccgccaccaaggacacctacgacgccctgcacatgcaggccctgcccccccgc

SEQ ID NO: 922 - DNA, 1086 bp, synthetic construct
  source 1..1086: mol_type = other DNA
atggccctgcccgttaccgccctactcctgcccctggccctcctgctccacgccgccaggccccaactccaacttgttgagtctgggggcggcttggttcaagctggtggctccttgcgactctcttgcgccgctagcgggaacattgttgatatagacgacatgggatggtatcgccaggcaccgggaaaacagcgcgatctggtcgccaccatcacggcgggtgggattgccaactatgccgattcagcgaaagggaggtttacgataagccgcgacaacgctaagaacacagtgtacctgcaaatgaactctctcaaaccagaggacactgcaacatattactgttacgcaatccggcggtactaccctagattcgattattgggggcaaggagcccaagttacagtatcctccaccaccacccctgcccccaggccccccacccccgcccccaccatcgccagccagcccctgtccctgcggcccgaggcctgccggcccgccgccggcggcgccgtgcacacccggggcctggacttcgcctgcgacatctacatctgggcccccctggccggaacctgcggcgtgctgctgctgtccctggtgatcaccctgtactgcaagcggggccggaagaagctgctgtacatcttcaagcagcccttcatgcgccccgtgcagaccacccaggaggaggacggctgcagctgcaggttccccgaggaggaggaggggggctgcgagctgcgggtgaagttcagcaggagcgccgacgcccctgcttaccagcagggccagaatcagctgtacaacgagctgaatctgggccggagggaggagtacgacgtgctggacaagcggaggggcagggaccccgagatgggcggcaagcccaggcggaagaacccccaggaggggctgtacaacgagctgcagaaggacaagatggccgaggcctactccgagatcggcatgaagggcgagaggcggagaggcaagggccatgacggcctgtaccagggcctgtccaccgccaccaaggacacctacgacgccctgcacatgcaggccctgcccccccgc

SEQ ID NO: 923 - DNA, 1086 bp, synthetic construct
  source 1..1086: mol_type = other DNA
atggccctgcccgttaccgccctactcctgcccctggccctcctgctccacgccgccaggccccaactccaacttgtggaatcaggagggggtctcgtacagacaggaggatcactcaacttgagttgtgccgcctctggagcttttgtgtctatagatgccatggcgtggtatcgacaggctcccggcaaggctcgggagcttgtcgccttttcaagcagcggtgggataacaaattatgcggacagtgtcaagggccgatttaccattactagggataacgcgaaaaatactgtttatctccaaatgaattcccttaaaccagaggatacggctgtgtactattgcaacgcagacatcttgcaatcaggttggtacacgtactggggacaaggaactcaggtgacagtgtctagcaccaccacccctgcccccaggccccccacccccgcccccaccatcgccagccagcccctgtccctgcggcccgaggcctgccggcccgccgccggcggcgccgtgcacacccggggcctggacttcgcctgcgacatctacatctgggcccccctggccggaacctgcggcgtgctgctgctgtccctggtgatcaccctgtactgcaagcggggccggaagaagctgctgtacatcttcaagcagcccttcatgcgccccgtgcagaccacccaggaggaggacggctgcagctgcaggttccccgaggaggaggaggggggctgcgagctgcgggtgaagttcagcaggagcgccgacgcccctgcttaccagcagggccagaatcagctgtacaacgagctgaatctgggccggagggaggagtacgacgtgctggacaagcggaggggcagggaccccgagatgggcggcaagcccaggcggaagaacccccaggaggggctgtacaacgagctgcagaaggacaagatggccgaggcctactccgagatcggcatgaagggcgagaggcggagaggcaagggccatgacggcctgtaccagggcctgtccaccgccaccaaggacacctacgacgccctgcacatgcaggccctgcccccccgc

SEQ ID NO: 924 - DNA, 1101 bp, synthetic construct
  source 1..1101: mol_type = other DNA
atggccctgcccgttaccgccctactcctgcccctggccctcctgctccacgccgccaggccccagttgcaacttgtggagagcggtggaggcctggttcgggcaggaggtagtctccggttgtcttgtgtattgtcagggaggacattttccagttacgcgatgggatggttcaggcaggctcctgggaaagaacgagaattcgtttcaactatttctctgtccggcggatcaaccttctatagcgattccgccaagggtcgctttaccataagtcgggacaacgccaaaaacaccgtttatctgcaaatgaatagtctgaagccagaggacgcggcggtgtactactgtgctgcacggcccgtgttgattagtcgcagttccacggactacgcttattgggggcctggaacccaggtgaccgtcagctctaccaccacccctgcccccaggccccccacccccgcccccaccatcgccagccagcccctgtccctgcggcccgaggcctgccggcccgccgccggcggcgccgtgcacacccggggcctggacttcgcctgcgacatctacatctgggcccccctggccggaacctgcggcgtgctgctgctgtccctggtgatcaccctgtactgcaagcggggccggaagaagctgctgtacatcttcaagcagcccttcatgcgccccgtgcagaccacccaggaggaggacggctgcagctgcaggttccccgaggaggaggaggggggctgcgagctgcgggtgaagttcagcaggagcgccgacgcccctgcttaccagcagggccagaatcagctgtacaacgagctgaatctgggccggagggaggagtacgacgtgctggacaagcggaggggcagggaccccgagatgggcggcaagcccaggcggaagaacccccaggaggggctgtacaacgagctgcagaaggacaagatggccgaggcctactccgagatcggcatgaagggcgagaggcggagaggcaagggccatgacggcctgtaccagggcctgtccaccgccaccaaggacacctacgacgccctgcacatgcaggccctgcccccccgc

SEQ ID NO: 925 - DNA, 1101 bp, synthetic construct
  source 1..1101: mol_type = other DNA
atggccctgcccgttaccgccctactcctgcccctggccctcctgctccacgccgccaggccccagcttcagctcgttgaatctgggggaggcctggttcgcgctggaggcagccttcgcctctcctgcgtgctttcaggacgaactttttcaagctatgcgatgggttggtttaggcaggcgcctggaaaagagcgggaatttgtcagtacgataagccttagcgggggtagtacattttactcagatagcgcgaaaggccgatttactatatcccgagataatgcgaaaaatacggtctatttgcagatgaatagtctgaaaccagaggatactgccgtctattactgcgctgcgaggcccgtacttatttcccggagctccatagactatgcttactggggtccgggcacacaggtaacggtctccagtaccaccacccctgcccccaggccccccacccccgcccccaccatcgccagccagcccctgtccctgcggcccgaggcctgccggcccgccgccggcggcgccgtgcacacccggggcctggacttcgcctgcgacatctacatctgggcccccctggccggaacctgcggcgtgctgctgctgtccctggtgatcaccctgtactgcaagcggggccggaagaagctgctgtacatcttcaagcagcccttcatgcgccccgtgcagaccacccaggaggaggacggctgcagctgcaggttccccgaggaggaggaggggggctgcgagctgcgggtgaagttcagcaggagcgccgacgcccctgcttaccagcagggccagaatcagctgtacaacgagctgaatctgggccggagggaggagtacgacgtgctggacaagcggaggggcagggaccccgagatgggcggcaagcccaggcggaagaacccccaggaggggctgtacaacgagctgcagaaggacaagatggccgaggcctactccgagatcggcatgaagggcgagaggcggagaggcaagggccatgacggcctgtaccagggcctgtccaccgccaccaaggacacctacgacgccctgcacatgcaggccctgcccccccgc

SEQ ID NO: 926 - DNA, 1104 bp, synthetic construct
  source 1..1104: mol_type = other DNA
atggccctgcccgttaccgccctactcctgcccctggccctcctgctccacgccgccaggccccaggtccaacttcaggaaagcggtgggggtttggtacaggcaggagaaacgctgggacttagttgcgtacacagtggacgcgcgttctcaggccatggtatggggtggtttcgccaggcccctggaaaagaaagggagtttgtggcggctataagttggtcaggcgtctcaactgcctatgccgactctgtaaaaggtcgattcaccatctctagagtgaacgctgacaacacggtgtcacttcaaatgaatagtctgaaacccgaggacacagccgtttacttctgcgcggcgggcctctactctcgaccaaccactgaacgcagggaatacatatactggggtcagggaactcaggtaacagttagcagcaccaccacccctgcccccaggccccccacccccgcccccaccatcgccagccagcccctgtccctgcggcccgaggcctgccggcccgccgccggcggcgccgtgcacacccggggcctggacttcgcctgcgacatctacatctgggcccccctggccggaacctgcggcgtgctgctgctgtccctggtgatcaccctgtactgcaagcggggccggaagaagctgctgtacatcttcaagcagcccttcatgcgccccgtgcagaccacccaggaggaggacggctgcagctgcaggttccccgaggaggaggaggggggctgcgagctgcgggtgaagttcagcaggagcgccgacgcccctgcttaccagcagggccagaatcagctgtacaacgagctgaatctgggccggagggaggagtacgacgtgctggacaagcggaggggcagggaccccgagatgggcggcaagcccaggcggaagaacccccaggaggggctgtacaacgagctgcagaaggacaagatggccgaggcctactccgagatcggcatgaagggcgagaggcggagaggcaagggccatgacggcctgtaccagggcctgtccaccgccaccaaggacacctacgacgccctgcacatgcaggccctgcccccccgc

SEQ ID NO: 927 - DNA, 1086 bp, synthetic construct
  source 1..1086: mol_type = other DNA
atggccctgcccgttaccgccctactcctgcccctggccctcctgctccacgccgccaggccccaagtacagctgcaagagagtgggggcgggctcgtccaagccgggggatctttgcggctcagttgcgcggcctctggtaattccgttgacattgacgacatgggatggtaccgacaggctcctggcaagcaacgagatttggtcgcgactatcaccgcaggaggcatcaccaagtatggtgactctgcgaaaggcaggttcacaataagcagagataacgtgaagaataccgtgtacttgcagatgaatagcctgaagcctgaggacaccgcaacctactactgttatgccgtccggcgctattacccacgcttcgactattggggccagggtacgcaagtaacagtaagtagtaccaccacccctgcccccaggccccccacccccgcccccaccatcgccagccagcccctgtccctgcggcccgaggcctgccggcccgccgccggcggcgccgtgcacacccggggcctggacttcgcctgcgacatctacatctgggcccccctggccggaacctgcggcgtgctgctgctgtccctggtgatcaccctgtactgcaagcggggccggaagaagctgctgtacatcttcaagcagcccttcatgcgccccgtgcagaccacccaggaggaggacggctgcagctgcaggttccccgaggaggaggaggggggctgcgagctgcgggtgaagttcagcaggagcgccgacgcccctgcttaccagcagggccagaatcagctgtacaacgagctgaatctgggccggagggaggagtacgacgtgctggacaagcggaggggcagggaccccgagatgggcggcaagcccaggcggaagaacccccaggaggggctgtacaacgagctgcagaaggacaagatggccgaggcctactccgagatcggcatgaagggcgagaggcggagaggcaagggccatgacggcctgtaccagggcctgtccaccgccaccaaggacacctacgacgccctgcacatgcaggccctgcccccccgc

SEQ ID NO: 928 - DNA, 1095 bp, synthetic construct
  source 1..1095: mol_type = other DNA
atggccctgcccgttaccgccctactcctgcccctggccctcctgctccacgccgccaggccccaggttcagttgcaagaaagcgggggaggcctcgttcagccgggtggctcattgaggttgtcatgcgccgcttcaggttctatattctctatgaacgcgatgggatggtatagacaagcccccggcaaacaacgcgaacttgtggcgactattacagataatgactttacttactatgcagcctccgtgaaagatcggtttacaatttctcgggggaacgccaagaacactgtgtatcttcagatgaacagtctgacgcctgaagatacggcggtctactattgcaatgcggatggcatctactccggtggaagatattacccatcttcatggggacagggtacacaagtcacagtaagcagcaccaccacccctgcccccaggccccccacccccgcccccaccatcgccagccagcccctgtccctgcggcccgaggcctgccggcccgccgccggcggcgccgtgcacacccggggcctggacttcgcctgcgacatctacatctgggcccccctggccggaacctgcggcgtgctgctgctgtccctggtgatcaccctgtactgcaagcggggccggaagaagctgctgtacatcttcaagcagcccttcatgcgccccgtgcagaccacccaggaggaggacggctgcagctgcaggttccccgaggaggaggaggggggctgcgagctgcgggtgaagttcagcaggagcgccgacgcccctgcttaccagcagggccagaatcagctgtacaacgagctgaatctgggccggagggaggagtacgacgtgctggacaagcggaggggcagggaccccgagatgggcggcaagcccaggcggaagaacccccaggaggggctgtacaacgagctgcagaaggacaagatggccgaggcctactccgagatcggcatgaagggcgagaggcggagaggcaagggccatgacggcctgtaccagggcctgtccaccgccaccaaggacacctacgacgccctgcacatgcaggccctgcccccccgc

SEQ ID NO: 929 - DNA, 1119 bp, synthetic construct
  source 1..1119: mol_type = other DNA
atggccctgcccgttaccgccctactcctgcccctggccctcctgctccacgccgccaggccccaggtacagcttcaggaatctggcggtggcctggtccagccaggaggaagcctgagattgagctgtgcggcatccggcagcattttttctgtaaatgatatgggctggtacagacaggctccagggaagcaacgcgaattggtggcggcctcatactctggtgggtcaacgaattatgccgatagtgttaagggacggtttacgattagcagggataatgcaaaaaacactgtgtatttgcaaatgaattctcttctccccgaagatacagctgtgtattattgtaatgccgatttggtcgtagttacgactacgccgcctagtttccccatgccgtaccgattccttgaggtgtggggtcagggtacgctggttaccgtcagcagcaccaccacccctgcccccaggccccccacccccgcccccaccatcgccagccagcccctgtccctgcggcccgaggcctgccggcccgccgccggcggcgccgtgcacacccggggcctggacttcgcctgcgacatctacatctgggcccccctggccggaacctgcggcgtgctgctgctgtccctggtgatcaccctgtactgcaagcggggccggaagaagctgctgtacatcttcaagcagcccttcatgcgccccgtgcagaccacccaggaggaggacggctgcagctgcaggttccccgaggaggaggaggggggctgcgagctgcgggtgaagttcagcaggagcgccgacgcccctgcttaccagcagggccagaatcagctgtacaacgagctgaatctgggccggagggaggagtacgacgtgctggacaagcggaggggcagggaccccgagatgggcggcaagcccaggcggaagaacccccaggaggggctgtacaacgagctgcagaaggacaagatggccgaggcctactccgagatcggcatgaagggcgagaggcggagaggcaagggccatgacggcctgtaccagggcctgtccaccgccaccaaggacacctacgacgccctgcacatgcaggccctgcccccccgc

SEQ ID NO: 930 - DNA, 1104 bp, synthetic construct
  source 1..1104: mol_type = other DNA
atggccctgcccgttaccgccctactcctgcccctggccctcctgctccacgccgccaggccccaagtacaacttgtagaatctggagggggtctcgtacacgcgggcggttctctccgcctttcttgcgctgccagtggaaggacattcaacacgatggcatggttccgccaagcaccaggaaaagagcgagaatttgtcgcggctatatcatggtccggaggtctcacttattacgcggactccgtgaaggggcgattcaccatttttcgggacaatgcgaagggtctggcctacctccaaatggattcattgaagccagaagatacggcagtgtactcatgcgccgcgagaaggaccttcagaacagcgctgattaacactgtaacggcttacgacacctggggccagggaactcaggtcactgtctcaagtaccaccacccctgcccccaggccccccacccccgcccccaccatcgccagccagcccctgtccctgcggcccgaggcctgccggcccgccgccggcggcgccgtgcacacccggggcctggacttcgcctgcgacatctacatctgggcccccctggccggaacctgcggcgtgctgctgctgtccctggtgatcaccctgtactgcaagcggggccggaagaagctgctgtacatcttcaagcagcccttcatgcgccccgtgcagaccacccaggaggaggacggctgcagctgcaggttccccgaggaggaggaggggggctgcgagctgcgggtgaagttcagcaggagcgccgacgcccctgcttaccagcagggccagaatcagctgtacaacgagctgaatctgggccggagggaggagtacgacgtgctggacaagcggaggggcagggaccccgagatgggcggcaagcccaggcggaagaacccccaggaggggctgtacaacgagctgcagaaggacaagatggccgaggcctactccgagatcggcatgaagggcgagaggcggagaggcaagggccatgacggcctgtaccagggcctgtccaccgccaccaaggacacctacgacgccctgcacatgcaggccctgcccccccgc

SEQ ID NO: 931 - DNA, 1104 bp, synthetic construct
  source 1..1104: mol_type = other DNA
atggccctgcccgttaccgccctactcctgcccctggccctcctgctccacgccgccaggccccaagttcaactggttgaatccgggggcgggctggtgcatgcgggcggttctcttcgactctcttgcgccgcctcaggtagaaccttcaatacgatggcttggtttcggcaagcaccgggtaaggagcgggagttcgtggcggcaattagctggtcaggtggactgacctattacggagattctgtgaagggccgcttcactatattccgggacaatgcgaagaatctggcgtatcttcaaatgaactcactgaagcccgaggacactgctgtgtactcctgcgctgctcgaaggactttcaggacgggacttatagatacggttacagcgtacgatacttgggggcagggaacccaggttacggtttctagcaccaccacccctgcccccaggccccccacccccgcccccaccatcgccagccagcccctgtccctgcggcccgaggcctgccggcccgccgccggcggcgccgtgcacacccggggcctggacttcgcctgcgacatctacatctgggcccccctggccggaacctgcggcgtgctgctgctgtccctggtgatcaccctgtactgcaagcggggccggaagaagctgctgtacatcttcaagcagcccttcatgcgccccgtgcagaccacccaggaggaggacggctgcagctgcaggttccccgaggaggaggaggggggctgcgagctgcgggtgaagttcagcaggagcgccgacgcccctgcttaccagcagggccagaatcagctgtacaacgagctgaatctgggccggagggaggagtacgacgtgctggacaagcggaggggcagggaccccgagatgggcggcaagcccaggcggaagaacccccaggaggggctgtacaacgagctgcagaaggacaagatggccgaggcctactccgagatcggcatgaagggcgagaggcggagaggcaagggccatgacggcctgtaccagggcctgtccaccgccaccaaggacacctacgacgccctgcacatgcaggccctgcccccccgc

SEQ ID NO: 932 - DNA, 1086 bp, synthetic construct
  source 1..1086: mol_type = other DNA
atggccctgcccgttaccgccctactcctgcccctggccctcctgctccacgccgccaggccccaggtccagcttgtggaatccggcggcgggttggtgcaagccggtgatagcctgcgcctttcttgcgcggctgctagtgggcgcgctttgagcggctggcaaatgggttggtatcggcaggcgccggggaaggaaagagagtttgttgcatccatttccatgtccgatgggagtactagctaccaagattctgtcaaggggagatttacgatcagccgcgacaatgcacttagtacaatgtctttgagaatgaacagtcttaaatccgaggacactgctatttactactgccaggggcggtctaggttcgggtttgagtattggggtcaaggcactcaagtcacagtctctagtaccaccacccctgcccccaggccccccacccccgcccccaccatcgccagccagcccctgtccctgcggcccgaggcctgccggcccgccgccggcggcgccgtgcacacccggggcctggacttcgcctgcgacatctacatctgggcccccctggccggaacctgcggcgtgctgctgctgtccctggtgatcaccctgtactgcaagcggggccggaagaagctgctgtacatcttcaagcagcccttcatgcgccccgtgcagaccacccaggaggaggacggctgcagctgcaggttccccgaggaggaggaggggggctgcgagctgcgggtgaagttcagcaggagcgccgacgcccctgcttaccagcagggccagaatcagctgtacaacgagctgaatctgggccggagggaggagtacgacgtgctggacaagcggaggggcagggaccccgagatgggcggcaagcccaggcggaagaacccccaggaggggctgtacaacgagctgcagaaggacaagatggccgaggcctactccgagatcggcatgaagggcgagaggcggagaggcaagggccatgacggcctgtaccagggcctgtccaccgccaccaaggacacctacgacgccctgcacatgcaggccctgcccccccgc

SEQ ID NO: 933 - DNA, 1110 bp, synthetic construct
  source 1..1110: mol_type = other DNA
atggccctgcccgttaccgccctactcctgcccctggccctcctgctccacgccgccaggccccaggtacaactcgtagaaagcggtgggggccttgttcaggcaggggagagcctccggttgtcttgcgtcgctagcggtcgagccttgtcaggacacggtatggggtggttccgacaagcgccagggaaggaaagagagttcgtagctgctatcagttggagtggggtgtcaactgcttacgcagactccgtaaaaggtcgcttcacgatcagtagggttaatgcggaaaacacagtgtctgtatccttgcagatgaactcactgaagccagatgatacagcagtctatttctgcgccgctgggttgtattcccgcccgacaacggagcgacgcgactacatatactggggacagggaacacaggttaccgtgagcagcaccaccacccctgcccccaggccccccacccccgcccccaccatcgccagccagcccctgtccctgcggcccgaggcctgccggcccgccgccggcggcgccgtgcacacccggggcctggacttcgcctgcgacatctacatctgggcccccctggccggaacctgcggcgtgctgctgctgtccctggtgatcaccctgtactgcaagcggggccggaagaagctgctgtacatcttcaagcagcccttcatgcgccccgtgcagaccacccaggaggaggacggctgcagctgcaggttccccgaggaggaggaggggggctgcgagctgcgggtgaagttcagcaggagcgccgacgcccctgcttaccagcagggccagaatcagctgtacaacgagctgaatctgggccggagggaggagtacgacgtgctggacaagcggaggggcagggaccccgagatgggcggcaagcccaggcggaagaacccccaggaggggctgtacaacgagctgcagaaggacaagatggccgaggcctactccgagatcggcatgaagggcgagaggcggagaggcaagggccatgacggcctgtaccagggcctgtccaccgccaccaaggacacctacgacgccctgcacatgcaggccctgcccccccgc

SEQ ID NO: 934 - DNA, 1089 bp, synthetic construct
  source 1..1089: mol_type = other DNA
atggccctgcccgttaccgccctactcctgcccctggccctcctgctccacgccgccaggccccaggtgcaactggtagaaagtggcgggggcctggtacaagcgggaggcagcttgcggctctcttgcgcggcggcgtcccacacgttcgattcttatacgatgggttggttccgacaggctccgggaaaagaaagggagttcgtggctgctgtgaattgggataatgtgaagaactacgcagatccggttaaagggcggttcacaatctctcgagacaatgtgaaaaaccgcgtgtatttgcagatgaatagcttgaaacccgaagatacggcagtctactattgtgcggcaggtaccaatctgccgacgagaggaagcggatcttgggggcagggtacacaagttactgtctcaagtaccaccacccctgcccccaggccccccacccccgcccccaccatcgccagccagcccctgtccctgcggcccgaggcctgccggcccgccgccggcggcgccgtgcacacccggggcctggacttcgcctgcgacatctacatctgggcccccctggccggaacctgcggcgtgctgctgctgtccctggtgatcaccctgtactgcaagcggggccggaagaagctgctgtacatcttcaagcagcccttcatgcgccccgtgcagaccacccaggaggaggacggctgcagctgcaggttccccgaggaggaggaggggggctgcgagctgcgggtgaagttcagcaggagcgccgacgcccctgcttaccagcagggccagaatcagctgtacaacgagctgaatctgggccggagggaggagtacgacgtgctggacaagcggaggggcagggaccccgagatgggcggcaagcccaggcggaagaacccccaggaggggctgtacaacgagctgcagaaggacaagatggccgaggcctactccgagatcggcatgaagggcgagaggcggagaggcaagggccatgacggcctgtaccagggcctgtccaccgccaccaaggacacctacgacgccctgcacatgcaggccctgcccccccgc

SEQ ID NO: 935 - DNA, 1089 bp, synthetic construct
  source 1..1089: mol_type = other DNA
atggccctgcccgttaccgccctactcctgcccctggccctcctgctccacgccgccaggccccaagtccaactcgtcgagtcaggaggtgggctcgttcaggcaggcgggagcctgaggttgagttgtgccgccgcaagtcttacctttgattcatatactatgggatggtttagacaggcgccaggtaaagaaagagagttcgtagcagcagttaactgggacaacgtaaagaattatgcagatccagtaaagggtcgctttaccatctcaagagataatgtcaaaaatacggtgtacctccaaatgaacagtctgaagcctgaggatacagccgtatactattgcgccgccgggaccaacctccccactatagagtcagggagttgggggcagggcactcaagtaactgtgagtagtaccaccacccctgcccccaggccccccacccccgcccccaccatcgccagccagcccctgtccctgcggcccgaggcctgccggcccgccgccggcggcgccgtgcacacccggggcctggacttcgcctgcgacatctacatctgggcccccctggccggaacctgcggcgtgctgctgctgtccctggtgatcaccctgtactgcaagcggggccggaagaagctgctgtacatcttcaagcagcccttcatgcgccccgtgcagaccacccaggaggaggacggctgcagctgcaggttccccgaggaggaggaggggggctgcgagctgcgggtgaagttcagcaggagcgccgacgcccctgcttaccagcagggccagaatcagctgtacaacgagctgaatctgggccggagggaggagtacgacgtgctggacaagcggaggggcagggaccccgagatgggcggcaagcccaggcggaagaacccccaggaggggctgtacaacgagctgcagaaggacaagatggccgaggcctactccgagatcggcatgaagggcgagaggcggagaggcaagggccatgacggcctgtaccagggcctgtccaccgccaccaaggacacctacgacgccctgcacatgcaggccctgcccccccgc

SEQ ID NO: 936 - DNA, 1086 bp, synthetic construct
  source 1..1086: mol_type = other DNA
atggccctgcccgttaccgccctactcctgcccctggccctcctgctccacgccgccaggccccaagtacaacttgttgagagcgggggaggattggtgcaggccggaggttccctccggctgtcctgcgctgcgtcaggaaatggggtagatatagacgacatgggttggtacagacaggcacccggcaaacaaagggacctggtagcatctattactgctggaggaattactaaatacgccgattctgcaaaaggacggtttacgatcagtcgggacaacgtaaagaacactgtttacctccagatgaattccctgaagccggaggacacagcgacttactattgttacgctatcagacgattctaccctcgcttcgactactggggccagggtacgcaggttacggtttcatctaccaccacccctgcccccaggccccccacccccgcccccaccatcgccagccagcccctgtccctgcggcccgaggcctgccggcccgccgccggcggcgccgtgcacacccggggcctggacttcgcctgcgacatctacatctgggcccccctggccggaacctgcggcgtgctgctgctgtccctggtgatcaccctgtactgcaagcggggccggaagaagctgctgtacatcttcaagcagcccttcatgcgccccgtgcagaccacccaggaggaggacggctgcagctgcaggttccccgaggaggaggaggggggctgcgagctgcgggtgaagttcagcaggagcgccgacgcccctgcttaccagcagggccagaatcagctgtacaacgagctgaatctgggccggagggaggagtacgacgtgctggacaagcggaggggcagggaccccgagatgggcggcaagcccaggcggaagaacccccaggaggggctgtacaacgagctgcagaaggacaagatggccgaggcctactccgagatcggcatgaagggcgagaggcggagaggcaagggccatgacggcctgtaccagggcctgtccaccgccaccaaggacacctacgacgccctgcacatgcaggccctgcccccccgc

SEQ ID NO: 937 - DNA, 1086 bp, synthetic construct
  source 1..1086: mol_type = other DNA
atggccctgcccgttaccgccctactcctgcccctggccctcctgctccacgccgccaggccccaggtacagctcgtcgaatccgggggaggcttggtccaggcgggcggaagtcttagattgtcttgtgccgcatctgggaacggcgttgatattgacgatatggggtggtatcgacaggcgcccggtaagcagcgcgatctggttgccagcatcacggcaggaggaatcactaattatgcggatagtgccaaaggaaggtttaccatctctcgggacaacgtcaaaaatacagtatatcttcagatgaactcccttaaaccagaggatactgcgacctattattgctacgcaatacgccggttttaccctcggtttgactactggggtcaagggacgcaggtgacagtatcatcaaccaccacccctgcccccaggccccccacccccgcccccaccatcgccagccagcccctgtccctgcggcccgaggcctgccggcccgccgccggcggcgccgtgcacacccggggcctggacttcgcctgcgacatctacatctgggcccccctggccggaacctgcggcgtgctgctgctgtccctggtgatcaccctgtactgcaagcggggccggaagaagctgctgtacatcttcaagcagcccttcatgcgccccgtgcagaccacccaggaggaggacggctgcagctgcaggttccccgaggaggaggaggggggctgcgagctgcgggtgaagttcagcaggagcgccgacgcccctgcttaccagcagggccagaatcagctgtacaacgagctgaatctgggccggagggaggagtacgacgtgctggacaagcggaggggcagggaccccgagatgggcggcaagcccaggcggaagaacccccaggaggggctgtacaacgagctgcagaaggacaagatggccgaggcctactccgagatcggcatgaagggcgagaggcggagaggcaagggccatgacggcctgtaccagggcctgtccaccgccaccaaggacacctacgacgccctgcacatgcaggccctgcccccccgc

SEQ ID NO: 938 - DNA, 1086 bp, synthetic construct
  source 1..1086: mol_type = other DNA
atggccctgcccgttaccgccctactcctgcccctggccctcctgctccacgccgccaggccccaggttcaactggtcgagtccggtggaggcttggtgcaagcgggtggtagtctgcggctgagctgcgctgctagtggtaacggtgtcgacatcgacgacatgggatggtacagacaggcaccagggaagcagagggaccttgttgctacaatcacagccggcgggataaccaaatacgcagattctgcaaagggtcggtttacaatttcacgagataatgtaaagaataccgtctatttgcagatgaacagccttaaacccgaagatactgccacatattattgttacgccataaggcgattctatccccgcttcgactattggggtcaggggactcaagttactgttagctccaccaccacccctgcccccaggccccccacccccgcccccaccatcgccagccagcccctgtccctgcggcccgaggcctgccggcccgccgccggcggcgccgtgcacacccggggcctggacttcgcctgcgacatctacatctgggcccccctggccggaacctgcggcgtgctgctgctgtccctggtgatcaccctgtactgcaagcggggccggaagaagctgctgtacatcttcaagcagcccttcatgcgccccgtgcagaccacccaggaggaggacggctgcagctgcaggttccccgaggaggaggaggggggctgcgagctgcgggtgaagttcagcaggagcgccgacgcccctgcttaccagcagggccagaatcagctgtacaacgagctgaatctgggccggagggaggagtacgacgtgctggacaagcggaggggcagggaccccgagatgggcggcaagcccaggcggaagaacccccaggaggggctgtacaacgagctgcagaaggacaagatggccgaggcctactccgagatcggcatgaagggcgagaggcggagaggcaagggccatgacggcctgtaccagggcctgtccaccgccaccaaggacacctacgacgccctgcacatgcaggccctgcccccccgc

SEQ ID NO: 939 - DNA, 1086 bp, synthetic construct
  source 1..1086: mol_type = other DNA
atggccctgcccgttaccgccctactcctgcccctggccctcctgctccacgccgccaggccccaggtgcaactcgttgaaagcgggggaggactcgtgcaagcgggaggatcactccgactgagttgtgctgcttcagggaatggcgttgatatagacgacatgggttggtatcgacaggcacccggaaagcaacgggatttggtcgcgactattacagcggggggtattactaactatgcggatagcgccaaggggcgattcactatctcacgcgataacgtgaaaaacaccgtatatcttcagatgaacagtttgaaaccagaagacaccggtacatactattgttacgctatcagaaaattttaccccagatttgattactgggggcagggaacgcaggttacggtcagtagcaccaccacccctgcccccaggccccccacccccgcccccaccatcgccagccagcccctgtccctgcggcccgaggcctgccggcccgccgccggcggcgccgtgcacacccggggcctggacttcgcctgcgacatctacatctgggcccccctggccggaacctgcggcgtgctgctgctgtccctggtgatcaccctgtactgcaagcggggccggaagaagctgctgtacatcttcaagcagcccttcatgcgccccgtgcagaccacccaggaggaggacggctgcagctgcaggttccccgaggaggaggaggggggctgcgagctgcgggtgaagttcagcaggagcgccgacgcccctgcttaccagcagggccagaatcagctgtacaacgagctgaatctgggccggagggaggagtacgacgtgctggacaagcggaggggcagggaccccgagatgggcggcaagcccaggcggaagaacccccaggaggggctgtacaacgagctgcagaaggacaagatggccgaggcctactccgagatcggcatgaagggcgagaggcggagaggcaagggccatgacggcctgtaccagggcctgtccaccgccaccaaggacacctacgacgccctgcacatgcaggccctgcccccccgc

SEQ ID NO: 940 - DNA, 1086 bp, synthetic construct
  source 1..1086: mol_type = other DNA
atggccctgcccgttaccgccctactcctgcccctggccctcctgctccacgccgccaggccccaggtccagctggttgaaagcggtggggggctggtccaagccggcggttctcttagacttagctgcgccgcgtctggtaacattgttgacatcgacgacatggggtggtataggcaggctccaggtaaacaacgagatttggttgcctcaatcacagcggggggtataaccaaatatgcagattcagctaagggacgattcaccattagccgagacaatgtaaagaacactgttagtttgcagatgaactcactgaaacctgaagatacggcgacatattattgttatgcagttagaaagtattaccccagatttgactattggggccaaggcactcaagtgaccgtatcctctaccaccacccctgcccccaggccccccacccccgcccccaccatcgccagccagcccctgtccctgcggcccgaggcctgccggcccgccgccggcggcgccgtgcacacccggggcctggacttcgcctgcgacatctacatctgggcccccctggccggaacctgcggcgtgctgctgctgtccctggtgatcaccctgtactgcaagcggggccggaagaagctgctgtacatcttcaagcagcccttcatgcgccccgtgcagaccacccaggaggaggacggctgcagctgcaggttccccgaggaggaggaggggggctgcgagctgcgggtgaagttcagcaggagcgccgacgcccctgcttaccagcagggccagaatcagctgtacaacgagctgaatctgggccggagggaggagtacgacgtgctggacaagcggaggggcagggaccccgagatgggcggcaagcccaggcggaagaacccccaggaggggctgtacaacgagctgcagaaggacaagatggccgaggcctactccgagatcggcatgaagggcgagaggcggagaggcaagggccatgacggcctgtaccagggcctgtccaccgccaccaaggacacctacgacgccctgcacatgcaggccctgcccccccgc

SEQ ID NO: 941 - DNA, 1089 bp, synthetic construct
  source 1..1089: mol_type = other DNA
atggccctgcccgttaccgccctactcctgcccctggccctcctgctccacgccgccaggccccaggtacaacttgtcgaatcaggtggaggactcgtgcaggctggggggtccctgcgcttgagttgcgccgctagtggtaggacattttccaattacgccatgggttggtttagacaagctcctgggaaggagcgcgaattcgtggctgcaattaactggtccggcggacgcatttactatacagactccgtgaaaggtcgatttacaatcagtagagacaacgccaagaatacggtttatcttcagatgaacagtcttaaaccggaagatactgccgtgtactattgcgctgcggggacgaattggtcaataccacctgattactggggtcaggggacgcaggtaaccgtgagctccaccaccacccctgcccccaggccccccacccccgcccccaccatcgccagccagcccctgtccctgcggcccgaggcctgccggcccgccgccggcggcgccgtgcacacccggggcctggacttcgcctgcgacatctacatctgggcccccctggccggaacctgcggcgtgctgctgctgtccctggtgatcaccctgtactgcaagcggggccggaagaagctgctgtacatcttcaagcagcccttcatgcgccccgtgcagaccacccaggaggaggacggctgcagctgcaggttccccgaggaggaggaggggggctgcgagctgcgggtgaagttcagcaggagcgccgacgcccctgcttaccagcagggccagaatcagctgtacaacgagctgaatctgggccggagggaggagtacgacgtgctggacaagcggaggggcagggaccccgagatgggcggcaagcccaggcggaagaacccccaggaggggctgtacaacgagctgcagaaggacaagatggccgaggcctactccgagatcggcatgaagggcgagaggcggagaggcaagggccatgacggcctgtaccagggcctgtccaccgccaccaaggacacctacgacgccctgcacatgcaggccctgcccccccgc

SEQ ID NO: 942 - DNA, 1101 bp, synthetic construct
  source 1..1101: mol_type = other DNA
atggccctgcccgttaccgccctactcctgcccctggccctcctgctccacgccgccaggccccaagtacagctcgtggagtcaggtggtggactcgttcaggcgggtggttcccttaggttgtcctgtgctgcgtcaggtcgcacgttcagctcctatgctatgggctggttcaggcaggcaccggggaaggagcgagaatttgtagcggcaatacgatggagtggaggctctacttattacggagatagtgttaaagggaggttcactatttctagagataatgcgaaaaacaccgtgtatctccaaatgaacagcctcaaacctgaagatacggcagtctactactgtgcggctgaccccattggcctcggatacgaaatgggagagtatgattactggggtcaaggtacgcaggttactgtatcaagtaccaccacccctgcccccaggccccccacccccgcccccaccatcgccagccagcccctgtccctgcggcccgaggcctgccggcccgccgccggcggcgccgtgcacacccggggcctggacttcgcctgcgacatctacatctgggcccccctggccggaacctgcggcgtgctgctgctgtccctggtgatcaccctgtactgcaagcggggccggaagaagctgctgtacatcttcaagcagcccttcatgcgccccgtgcagaccacccaggaggaggacggctgcagctgcaggttccccgaggaggaggaggggggctgcgagctgcgggtgaagttcagcaggagcgccgacgcccctgcttaccagcagggccagaatcagctgtacaacgagctgaatctgggccggagggaggagtacgacgtgctggacaagcggaggggcagggaccccgagatgggcggcaagcccaggcggaagaacccccaggaggggctgtacaacgagctgcagaaggacaagatggccgaggcctactccgagatcggcatgaagggcgagaggcggagaggcaagggccatgacggcctgtaccagggcctgtccaccgccaccaaggacacctacgacgccctgcacatgcaggccctgcccccccgc

SEQ ID NO: 943 - DNA, 1098 bp, synthetic construct
  source 1..1098: mol_type = other DNA
atggccctgcccgttaccgccctactcctgcccctggccctcctgctccacgccgccaggccccaggtacagcttgtcgaaagcgggggcggtctggttcaggccggtggaagtttgaggctcagttgtgcagcgagcgggagaaccttctccagttacgcgatggggtggttccgacaggcgccagggaaggagagagaattcgtggcagcaatctcatggtccggcggaagcatttattatgcggactctgtaaaggggcgatttacaatatcccgagacaacgcgaagaacacagtatccctccaaatgaatagcctgaagcctgaagacacggctgtgtactattgtgccgcagacggaacgctccgcacgcccatgaaccttattcattattgggggcagggaacccaagtgactgtatcttctaccaccacccctgcccccaggccccccacccccgcccccaccatcgccagccagcccctgtccctgcggcccgaggcctgccggcccgccgccggcggcgccgtgcacacccggggcctggacttcgcctgcgacatctacatctgggcccccctggccggaacctgcggcgtgctgctgctgtccctggtgatcaccctgtactgcaagcggggccggaagaagctgctgtacatcttcaagcagcccttcatgcgccccgtgcagaccacccaggaggaggacggctgcagctgcaggttccccgaggaggaggaggggggctgcgagctgcgggtgaagttcagcaggagcgccgacgcccctgcttaccagcagggccagaatcagctgtacaacgagctgaatctgggccggagggaggagtacgacgtgctggacaagcggaggggcagggaccccgagatgggcggcaagcccaggcggaagaacccccaggaggggctgtacaacgagctgcagaaggacaagatggccgaggcctactccgagatcggcatgaagggcgagaggcggagaggcaagggccatgacggcctgtaccagggcctgtccaccgccaccaaggacacctacgacgccctgcacatgcaggccctgcccccccgc

SEQ ID NO: 944 - DNA, 1104 bp, synthetic construct
  source 1..1104: mol_type = other DNA
atggccctgcccgttaccgccctactcctgcccctggccctcctgctccacgccgccaggccccaagtccaactggtagagagtggcggtgggctcgtccaagccgggggctctctcaggttgtcctgtgccgcgtccggcaggaccttctcaagttatgcgatgggatggttccgacaggcaccaggaaaagagagggagtttgtcgcagctatttcatggtctggcggtagcacgtattatgccaatagcgtgaaagggcggttcacgattagtcgggacaatgcgaaaaacaccgtttatctgcaaatgaattccctgaagcctgaggacaccgctgtgtactactgcgctcctggcgaagaagtagcaggcaagtatttccgccaactctatgactactgggggcagggcacacaagttacagtgagttccaccaccacccctgcccccaggccccccacccccgcccccaccatcgccagccagcccctgtccctgcggcccgaggcctgccggcccgccgccggcggcgccgtgcacacccggggcctggacttcgcctgcgacatctacatctgggcccccctggccggaacctgcggcgtgctgctgctgtccctggtgatcaccctgtactgcaagcggggccggaagaagctgctgtacatcttcaagcagcccttcatgcgccccgtgcagaccacccaggaggaggacggctgcagctgcaggttccccgaggaggaggaggggggctgcgagctgcgggtgaagttcagcaggagcgccgacgcccctgcttaccagcagggccagaatcagctgtacaacgagctgaatctgggccggagggaggagtacgacgtgctggacaagcggaggggcagggaccccgagatgggcggcaagcccaggcggaagaacccccaggaggggctgtacaacgagctgcagaaggacaagatggccgaggcctactccgagatcggcatgaagggcgagaggcggagaggcaagggccatgacggcctgtaccagggcctgtccaccgccaccaaggacacctacgacgccctgcacatgcaggccctgcccccccgc

SEQ ID NO: 945 - DNA, 1104 bp, synthetic construct
  source 1..1104: mol_type = other DNA
atggccctgcccgttaccgccctactcctgcccctggccctcctgctccacgccgccaggccccaagttcaacttgttgagtccgggggtggcctcgtccaagcaggagggtccctccggctgtcatgcgcggctagcggtcggacatttagcagttatgcgatggggtggttccggcaagcaccaggtaaggaaagggagtttgtggcagacatttcatggagtggaggtacgacaaattatgcaaacagcgttaaggggcgctttacgatttcccgagacaatgcaaaaaacacagtatatctgcagatgaactcactcaagccggaagatacggcggtttactactgtgcgcctggagaagaagtggacggcaaatatttccgccctctctatgattactgggggcagggaactcaggtaaccgtaagcagtaccaccacccctgcccccaggccccccacccccgcccccaccatcgccagccagcccctgtccctgcggcccgaggcctgccggcccgccgccggcggcgccgtgcacacccggggcctggacttcgcctgcgacatctacatctgggcccccctggccggaacctgcggcgtgctgctgctgtccctggtgatcaccctgtactgcaagcggggccggaagaagctgctgtacatcttcaagcagcccttcatgcgccccgtgcagaccacccaggaggaggacggctgcagctgcaggttccccgaggaggaggaggggggctgcgagctgcgggtgaagttcagcaggagcgccgacgcccctgcttaccagcagggccagaatcagctgtacaacgagctgaatctgggccggagggaggagtacgacgtgctggacaagcggaggggcagggaccccgagatgggcggcaagcccaggcggaagaacccccaggaggggctgtacaacgagctgcagaaggacaagatggccgaggcctactccgagatcggcatgaagggcgagaggcggagaggcaagggccatgacggcctgtaccagggcctgtccaccgccaccaaggacacctacgacgccctgcacatgcaggccctgcccccccgc

SEQ ID NO: 946 - DNA, 1104 bp, synthetic construct
  source 1..1104: mol_type = other DNA
atggccctgcccgttaccgccctactcctgcccctggccctcctgctccacgccgccaggccccaggtacaactggtggaatcaggtggggggttggtccaggctggaggatcattgcgactcagttgcgccgcatcagggcgaactttttctacctatacgatgggatggtttcggcaagcccccggtaaagaacgacagtttgtcgcagccattagttcctcaggagactcaacctactacactgattccgtgaaaggccggtttaccatttccagagataatgccaagaacactgtttatctgcagatggacagcctgaagcccgaggacacagcggtgtattactgcgcaccgggtgaagaagtagctggaaaatacttccgcgcactgtatgattactggggccagggcactcaagttaccgtctctagtaccaccacccctgcccccaggccccccacccccgcccccaccatcgccagccagcccctgtccctgcggcccgaggcctgccggcccgccgccggcggcgccgtgcacacccggggcctggacttcgcctgcgacatctacatctgggcccccctggccggaacctgcggcgtgctgctgctgtccctggtgatcaccctgtactgcaagcggggccggaagaagctgctgtacatcttcaagcagcccttcatgcgccccgtgcagaccacccaggaggaggacggctgcagctgcaggttccccgaggaggaggaggggggctgcgagctgcgggtgaagttcagcaggagcgccgacgcccctgcttaccagcagggccagaatcagctgtacaacgagctgaatctgggccggagggaggagtacgacgtgctggacaagcggaggggcagggaccccgagatgggcggcaagcccaggcggaagaacccccaggaggggctgtacaacgagctgcagaaggacaagatggccgaggcctactccgagatcggcatgaagggcgagaggcggagaggcaagggccatgacggcctgtaccagggcctgtccaccgccaccaaggacacctacgacgccctgcacatgcaggccctgcccccccgc

SEQ ID NO: 947 - DNA, 1104 bp, synthetic construct
  source 1..1104: mol_type = other DNA
atggccctgcccgttaccgccctactcctgcccctggccctcctgctccacgccgccaggccccaagtccagcttgtagaaagcggtggcggtctcgttcaagccggtggaagcctccggctttcatgtgcggcatcaggttcaattttctccattaacgcgatggcatggtataggcaagcccctggtaagcagcgcgagctcgtggctgttatcacatcaggagggagtactaactacgcggattctgttaaaggaagatttaccatttcccgcgataatgctaagaatacagtctacctccaaatgaactccctgaagcctgaagacactgccgtgtattattgcaatgctgatctggtctactactcaggcaatcctggagactatggtatggactactggggaaaggggacattggtgactgtcagtagtaccaccacccctgcccccaggccccccacccccgcccccaccatcgccagccagcccctgtccctgcggcccgaggcctgccggcccgccgccggcggcgccgtgcacacccggggcctggacttcgcctgcgacatctacatctgggcccccctggccggaacctgcggcgtgctgctgctgtccctggtgatcaccctgtactgcaagcggggccggaagaagctgctgtacatcttcaagcagcccttcatgcgccccgtgcagaccacccaggaggaggacggctgcagctgcaggttccccgaggaggaggaggggggctgcgagctgcgggtgaagttcagcaggagcgccgacgcccctgcttaccagcagggccagaatcagctgtacaacgagctgaatctgggccggagggaggagtacgacgtgctggacaagcggaggggcagggaccccgagatgggcggcaagcccaggcggaagaacccccaggaggggctgtacaacgagctgcagaaggacaagatggccgaggcctactccgagatcggcatgaagggcgagaggcggagaggcaagggccatgacggcctgtaccagggcctgtccaccgccaccaaggacacctacgacgccctgcacatgcaggccctgcccccccgc

SEQ ID NO: 948 - DNA, 1077 bp, synthetic construct
  source 1..1077: mol_type = other DNA
atggccctgcccgttaccgccctactcctgcccctggccctcctgctccacgccgccaggccccaggttcagttggtagaatccggcggtggattggtgcaggctggagggtccttgagactttcctgtgttgcgagcgggaggacgttttcaatcaataacattaactggtatagacaggcccctggcaaggagcgagagttcgttgccactaccagatggcggggagacagcacttactacgctgactctgtggccggtcgatttaccatatcaagagactcagctaaaaataccgtgtacctccaaatgaactcactgaaaccagaggatactgctatatactattgcaatgctaagggcggcgttgatgtctggggtcaaggaacccaggtaacggtttccagtaccaccacccctgcccccaggccccccacccccgcccccaccatcgccagccagcccctgtccctgcggcccgaggcctgccggcccgccgccggcggcgccgtgcacacccggggcctggacttcgcctgcgacatctacatctgggcccccctggccggaacctgcggcgtgctgctgctgtccctggtgatcaccctgtactgcaagcggggccggaagaagctgctgtacatcttcaagcagcccttcatgcgccccgtgcagaccacccaggaggaggacggctgcagctgcaggttccccgaggaggaggaggggggctgcgagctgcgggtgaagttcagcaggagcgccgacgcccctgcttaccagcagggccagaatcagctgtacaacgagctgaatctgggccggagggaggagtacgacgtgctggacaagcggaggggcagggaccccgagatgggcggcaagcccaggcggaagaacccccaggaggggctgtacaacgagctgcagaaggacaagatggccgaggcctactccgagatcggcatgaagggcgagaggcggagaggcaagggccatgacggcctgtaccagggcctgtccaccgccaccaaggacacctacgacgccctgcacatgcaggccctgcccccccgc

SEQ ID NO: 949 - DNA, 1080 bp, synthetic construct
  source 1..1080: mol_type = other DNA
atggccctgcccgttaccgccctactcctgcccctggccctcctgctccacgccgccaggccccaggtacagcttgttgagtccggcgggggtctcgtacagccgggcggctccttgcgcctcagttgtgcggcgagtggattcttgttctcactctacgctatggcatgggtccggcaagccccaggcaaaggtctggagtgggtaagtgatataagcaacggaggtgttaccacaagatacgcggattcagtaaaaggccggtttacaatttcacgagataatgcgaaaaatacgttgtatcttcaaatggatagtctgacgccgggggatactgcggtctattactgtgctgttacaaccacgggctggcgggcaagaggccaagggacccaagtgactgtctcctccaccaccacccctgcccccaggccccccacccccgcccccaccatcgccagccagcccctgtccctgcggcccgaggcctgccggcccgccgccggcggcgccgtgcacacccggggcctggacttcgcctgcgacatctacatctgggcccccctggccggaacctgcggcgtgctgctgctgtccctggtgatcaccctgtactgcaagcggggccggaagaagctgctgtacatcttcaagcagcccttcatgcgccccgtgcagaccacccaggaggaggacggctgcagctgcaggttccccgaggaggaggaggggggctgcgagctgcgggtgaagttcagcaggagcgccgacgcccctgcttaccagcagggccagaatcagctgtacaacgagctgaatctgggccggagggaggagtacgacgtgctggacaagcggaggggcagggaccccgagatgggcggcaagcccaggcggaagaacccccaggaggggctgtacaacgagctgcagaaggacaagatggccgaggcctactccgagatcggcatgaagggcgagaggcggagaggcaagggccatgacggcctgtaccagggcctgtccaccgccaccaaggacacctacgacgccctgcacatgcaggccctgcccccccgc

SEQ ID NO: 950 - DNA, 1083 bp, synthetic construct
  source 1..1083: mol_type = other DNA
atggccctgcccgttaccgccctactcctgcccctggccctcctgctccacgccgccaggccccaggtccaacttgttgaatcaggcggaggactcgttcagcctggaggcagcctgaggctttcttgcgccgcttcaggaagcatattcagaccaaacgacatgggctggtaccgacaggcgcccggtaaacaaagggaactcgtggcaatcataacggacgggggtatcacaaattacgctgcaacggtaaaggggaggtttacgattagtcgagacaatgccaaaaatacagtgtaccttcaaatgaacagcctcaaaccggaggacacggcggtttattattgcaaccttaatatcccgtaccctcgcgtttcctcatggggccagggaacgcaggtcacagtctcatctaccaccacccctgcccccaggccccccacccccgcccccaccatcgccagccagcccctgtccctgcggcccgaggcctgccggcccgccgccggcggcgccgtgcacacccggggcctggacttcgcctgcgacatctacatctgggcccccctggccggaacctgcggcgtgctgctgctgtccctggtgatcaccctgtactgcaagcggggccggaagaagctgctgtacatcttcaagcagcccttcatgcgccccgtgcagaccacccaggaggaggacggctgcagctgcaggttccccgaggaggaggaggggggctgcgagctgcgggtgaagttcagcaggagcgccgacgcccctgcttaccagcagggccagaatcagctgtacaacgagctgaatctgggccggagggaggagtacgacgtgctggacaagcggaggggcagggaccccgagatgggcggcaagcccaggcggaagaacccccaggaggggctgtacaacgagctgcagaaggacaagatggccgaggcctactccgagatcggcatgaagggcgagaggcggagaggcaagggccatgacggcctgtaccagggcctgtccaccgccaccaaggacacctacgacgccctgcacatgcaggccctgcccccccgc

SEQ ID NO: 951 - DNA, 1104 bp, synthetic construct
  source 1..1104: mol_type = other DNA
atggccctgcccgttaccgccctactcctgcccctggccctcctgctccacgccgccaggccccaggtgcagctcgtcgagtctgggggaggccttgtccagcctggtggctcccttcgcctgagttgtgcagcatctgggagtacatttaacaccatggcctggttccggcaagcgccgggaaaggagcgcgaattcgtggcggccatatcatggagcggcggattgacctattatggtgattccgtcaagggaagattcaccatattcagggataacgcgaagaatttgggctatctccagatgaattcccttaaaccggaagatactgcggtatatagttgcgccgcgaggacaactttccgaaccggtttgatcgtaaccgtaacagcctatgatacatggggtcaaggtacacaagtgacagtcagttccaccaccacccctgcccccaggccccccacccccgcccccaccatcgccagccagcccctgtccctgcggcccgaggcctgccggcccgccgccggcggcgccgtgcacacccggggcctggacttcgcctgcgacatctacatctgggcccccctggccggaacctgcggcgtgctgctgctgtccctggtgatcaccctgtactgcaagcggggccggaagaagctgctgtacatcttcaagcagcccttcatgcgccccgtgcagaccacccaggaggaggacggctgcagctgcaggttccccgaggaggaggaggggggctgcgagctgcgggtgaagttcagcaggagcgccgacgcccctgcttaccagcagggccagaatcagctgtacaacgagctgaatctgggccggagggaggagtacgacgtgctggacaagcggaggggcagggaccccgagatgggcggcaagcccaggcggaagaacccccaggaggggctgtacaacgagctgcagaaggacaagatggccgaggcctactccgagatcggcatgaagggcgagaggcggagaggcaagggccatgacggcctgtaccagggcctgtccaccgccaccaaggacacctacgacgccctgcacatgcaggccctgcccccccgc

SEQ ID NO: 952 - DNA, 1101 bp, synthetic construct
  source 1..1101: mol_type = other DNA
atggccctgcccgttaccgccctactcctgcccctggccctcctgctccacgccgccaggccccaggtgcagttggtagagtccggaggaggtctcgtgcagcccggaggttcactcagactttcatgtgtgttgagtgggcggacgttttctagttatgcaatgggatggttccggcaagcgccgggcaaagaaagagagttcgtgagtacaatctccttgtccgggggaagcacattttactcagggagtgcgaaagggcggttcacgataagtagagataacgccaaaaacaccgtttatctccagatgaactccttgaagcctgaagacactgcggtgtactactgcgctgcacgacctgttcttattagccggagctcaacagactacgcctattggggtccgggaactcaagttacagttagctcaaccaccacccctgcccccaggccccccacccccgcccccaccatcgccagccagcccctgtccctgcggcccgaggcctgccggcccgccgccggcggcgccgtgcacacccggggcctggacttcgcctgcgacatctacatctgggcccccctggccggaacctgcggcgtgctgctgctgtccctggtgatcaccctgtactgcaagcggggccggaagaagctgctgtacatcttcaagcagcccttcatgcgccccgtgcagaccacccaggaggaggacggctgcagctgcaggttccccgaggaggaggaggggggctgcgagctgcgggtgaagttcagcaggagcgccgacgcccctgcttaccagcagggccagaatcagctgtacaacgagctgaatctgggccggagggaggagtacgacgtgctggacaagcggaggggcagggaccccgagatgggcggcaagcccaggcggaagaacccccaggaggggctgtacaacgagctgcagaaggacaagatggccgaggcctactccgagatcggcatgaagggcgagaggcggagaggcaagggccatgacggcctgtaccagggcctgtccaccgccaccaaggacacctacgacgccctgcacatgcaggccctgcccccccgc

SEQ ID NO: 953 - DNA, 1101 bp, synthetic construct
  source 1..1101: mol_type = other DNA
atggccctgcccgttaccgccctactcctgcccctggccctcctgctccacgccgccaggccccaggttcaactcgttgagtccggcggcggccttgtccaacctggtgggagtttgcggttgtcctgtgtacttagcggcagaacctttagctcatacgcgatgggatggtttcgccaagcgccgggtaaagagcgagagttcgtatcaactatcagcttgtctggcggatcaacgttctatagcggttctgccaaaggacggttcaccatttcaagagacaatgcgaaaaacactgtatatctgcagatgaatagtctcaaacctgaggacactgccgtctactattgtgctgctcggccagttttgataagccgaagtagcaccgattatgcctactggggacctggtactcaggtgaccgtttccagtaccaccacccctgcccccaggccccccacccccgcccccaccatcgccagccagcccctgtccctgcggcccgaggcctgccggcccgccgccggcggcgccgtgcacacccggggcctggacttcgcctgcgacatctacatctgggcccccctggccggaacctgcggcgtgctgctgctgtccctggtgatcaccctgtactgcaagcggggccggaagaagctgctgtacatcttcaagcagcccttcatgcgccccgtgcagaccacccaggaggaggacggctgcagctgcaggttccccgaggaggaggaggggggctgcgagctgcgggtgaagttcagcaggagcgccgacgcccctgcttaccagcagggccagaatcagctgtacaacgagctgaatctgggccggagggaggagtacgacgtgctggacaagcggaggggcagggaccccgagatgggcggcaagcccaggcggaagaacccccaggaggggctgtacaacgagctgcagaaggacaagatggccgaggcctactccgagatcggcatgaagggcgagaggcggagaggcaagggccatgacggcctgtaccagggcctgtccaccgccaccaaggacacctacgacgccctgcacatgcaggccctgcccccccgc

SEQ ID NO: 954 - DNA, 1104 bp, synthetic construct
  source 1..1104: mol_type = other DNA
atggccctgcccgttaccgccctactcctgcccctggccctcctgctccacgccgccaggccccaggtgcaactcgtagaaagcgggggtgggttggttcaaaccggtggctcattgcgattgtcctgcgcggcatctggaagaacgtttagttcttatgcgatgggttggtttaggcaggctcctggaaaggaacgggaatttgtcgccgcaatcacctggtcaggtggatccacctattacgcaaacagtgtaaaggggcgctttacaatctctcgggacaacgctaaaaatacagtggatttgcaaatgaacagtctcaagcccgaggacacagcagtctattattgcactcctggagaagaagtagccggtaagtattttagacctctgtatgattattgggggcaagggacgcaagttaccgtttcatcaaccaccacccctgcccccaggccccccacccccgcccccaccatcgccagccagcccctgtccctgcggcccgaggcctgccggcccgccgccggcggcgccgtgcacacccggggcctggacttcgcctgcgacatctacatctgggcccccctggccggaacctgcggcgtgctgctgctgtccctggtgatcaccctgtactgcaagcggggccggaagaagctgctgtacatcttcaagcagcccttcatgcgccccgtgcagaccacccaggaggaggacggctgcagctgcaggttccccgaggaggaggaggggggctgcgagctgcgggtgaagttcagcaggagcgccgacgcccctgcttaccagcagggccagaatcagctgtacaacgagctgaatctgggccggagggaggagtacgacgtgctggacaagcggaggggcagggaccccgagatgggcggcaagcccaggcggaagaacccccaggaggggctgtacaacgagctgcagaaggacaagatggccgaggcctactccgagatcggcatgaagggcgagaggcggagaggcaagggccatgacggcctgtaccagggcctgtccaccgccaccaaggacacctacgacgccctgcacatgcaggccctgcccccccgc

SEQ ID NO: 955 - DNA, 1080 bp, synthetic construct
  source 1..1080: mol_type = other DNA
atggccctgcccgttaccgccctactcctgcccctggccctcctgctccacgccgccaggccccaggtgcaactggttgagtccggcggtggcttggtacagcccggcggcagtctccgacttagttgtacggcgtcaggtcgcacaattgcgagcacgattatgggctggtacagacaaacgcccggcaaagaacgggaatttgtcgctatcagcgctaggagcggcgattccgaatcctatgcaagttcagtgaaggataggtttaccatcagtcgcgataatgcgaaaaataccgtctacctccagatgaacaatttgaaacctgaggacactgctatatattactgctactggaatacgggagcaggaaccatctgggggcagggaacacaagtgactgtctcttccaccaccacccctgcccccaggccccccacccccgcccccaccatcgccagccagcccctgtccctgcggcccgaggcctgccggcccgccgccggcggcgccgtgcacacccggggcctggacttcgcctgcgacatctacatctgggcccccctggccggaacctgcggcgtgctgctgctgtccctggtgatcaccctgtactgcaagcggggccggaagaagctgctgtacatcttcaagcagcccttcatgcgccccgtgcagaccacccaggaggaggacggctgcagctgcaggttccccgaggaggaggaggggggctgcgagctgcgggtgaagttcagcaggagcgccgacgcccctgcttaccagcagggccagaatcagctgtacaacgagctgaatctgggccggagggaggagtacgacgtgctggacaagcggaggggcagggaccccgagatgggcggcaagcccaggcggaagaacccccaggaggggctgtacaacgagctgcagaaggacaagatggccgaggcctactccgagatcggcatgaagggcgagaggcggagaggcaagggccatgacggcctgtaccagggcctgtccaccgccaccaaggacacctacgacgccctgcacatgcaggccctgcccccccgc

SEQ ID NO: 956 - DNA, 1098 bp, synthetic construct
  source 1..1098: mol_type = other DNA
atggccctgcccgttaccgccctactcctgcccctggccctcctgctccacgccgccaggccccagcttcagcttgtggaaagcggagggggcctggtgcaagcaggtggcagtcttcgactctcatgtgcggcgtcaggacggactgtcagttcatacgccatgggctggttcaggcaggcaccgggcaaagaaagggagtttgtcgcggccattagttggtctggggggagcacttactatgccgatagtgttaagggtagatttactattagtcgcgataacgctaagaacaccgtttatttgcagatgaactcacttaaaccagaggatacagcagtgtactattgcgctgccgaccccagcctgagtcgcaccatggacgagataggctcctggggtcaaggaacgcaggtcacggtttcctctaccaccacccctgcccccaggccccccacccccgcccccaccatcgccagccagcccctgtccctgcggcccgaggcctgccggcccgccgccggcggcgccgtgcacacccggggcctggacttcgcctgcgacatctacatctgggcccccctggccggaacctgcggcgtgctgctgctgtccctggtgatcaccctgtactgcaagcggggccggaagaagctgctgtacatcttcaagcagcccttcatgcgccccgtgcagaccacccaggaggaggacggctgcagctgcaggttccccgaggaggaggaggggggctgcgagctgcgggtgaagttcagcaggagcgccgacgcccctgcttaccagcagggccagaatcagctgtacaacgagctgaatctgggccggagggaggagtacgacgtgctggacaagcggaggggcagggaccccgagatgggcggcaagcccaggcggaagaacccccaggaggggctgtacaacgagctgcagaaggacaagatggccgaggcctactccgagatcggcatgaagggcgagaggcggagaggcaagggccatgacggcctgtaccagggcctgtccaccgccaccaaggacacctacgacgccctgcacatgcaggccctgcccccccgc

SEQ ID NO: 957 - DNA, 1086 bp, synthetic construct
  source 1..1086: mol_type = other DNA
atggccctgcccgttaccgccctactcctgcccctggccctcctgctccacgccgccaggccccaggtccagttggtggagagcggcggtgggttggttcaggcgggagggtctctcaggctgagctgtgctgcaagtgggaatatcgtcgacatcgacgatatgggttggtaccgccaagcacctgggaagcaacgagatttggttgcatctataaccgcaggcagaataaccaaatatgctgatagcgcgaaaggaaggtttacaatatctagggataatgttaaaaataccgtttatctccagatgaactcactgaagccagaagataccgcgacttattactgttacgcaataaggcggtcatacccaaggttcgactactggggacaggggacacaggtcacagtgtcaagcaccaccacccctgcccccaggccccccacccccgcccccaccatcgccagccagcccctgtccctgcggcccgaggcctgccggcccgccgccggcggcgccgtgcacacccggggcctggacttcgcctgcgacatctacatctgggcccccctggccggaacctgcggcgtgctgctgctgtccctggtgatcaccctgtactgcaagcggggccggaagaagctgctgtacatcttcaagcagcccttcatgcgccccgtgcagaccacccaggaggaggacggctgcagctgcaggttccccgaggaggaggaggggggctgcgagctgcgggtgaagttcagcaggagcgccgacgcccctgcttaccagcagggccagaatcagctgtacaacgagctgaatctgggccggagggaggagtacgacgtgctggacaagcggaggggcagggaccccgagatgggcggcaagcccaggcggaagaacccccaggaggggctgtacaacgagctgcagaaggacaagatggccgaggcctactccgagatcggcatgaagggcgagaggcggagaggcaagggccatgacggcctgtaccagggcctgtccaccgccaccaaggacacctacgacgccctgcacatgcaggccctgcccccccgc

SEQ ID NO: 958 - DNA, 1119 bp, synthetic construct
  source 1..1119: mol_type = other DNA
atggccctgcccgttaccgccctactcctgcccctggccctcctgctccacgccgccaggccccaagttcaattggtagagtccggtggaggactggtccaaccgggagggtctttgcggttgtcatgcgccgcctctggcagcattttttctgtgaatgatatgggttggtatcgacaagcgcctggtaagcaacgggaactcgtagccgcgatatattccggtggctctacaaattacgcggatagtgtaaaaggccggtttaccatctcccgagataatgctaagaataccgtctatcttcaaatgaacagcttgaagcccgaggacacagcagtgtattattgcaacgccgacattgtagtggtcacgactacccctccgagtttccctatgccctatcggttcttggaggtatggggtcagggaacgcttgttactgtaagttctaccaccacccctgcccccaggccccccacccccgcccccaccatcgccagccagcccctgtccctgcggcccgaggcctgccggcccgccgccggcggcgccgtgcacacccggggcctggacttcgcctgcgacatctacatctgggcccccctggccggaacctgcggcgtgctgctgctgtccctggtgatcaccctgtactgcaagcggggccggaagaagctgctgtacatcttcaagcagcccttcatgcgccccgtgcagaccacccaggaggaggacggctgcagctgcaggttccccgaggaggaggaggggggctgcgagctgcgggtgaagttcagcaggagcgccgacgcccctgcttaccagcagggccagaatcagctgtacaacgagctgaatctgggccggagggaggagtacgacgtgctggacaagcggaggggcagggaccccgagatgggcggcaagcccaggcggaagaacccccaggaggggctgtacaacgagctgcagaaggacaagatggccgaggcctactccgagatcggcatgaagggcgagaggcggagaggcaagggccatgacggcctgtaccagggcctgtccaccgccaccaaggacacctacgacgccctgcacatgcaggccctgcccccccgc

SEQ ID NO: 959 - DNA, 1080 bp, synthetic construct
  source 1..1080: mol_type = other DNA
atggccctgcccgttaccgccctactcctgcccctggccctcctgctccacgccgccaggccccaggttcagttggttgaatctggaggtggtctcgtacaggtcggcgggtcattgcggctgtcctgctctattagcaggagcattgcaatttttaattttatggcctggtatagggaggccgaagggaagcagcgggaactcgtcgcctccatcactggcgggagtcgactgtcatatattgatagtgttaagggacgcttcacggtcagtaaggacacagctaacaatacactcgatctccaaatgaactccctgcgaccagaggacaccgccgtgtatcgatgcgcggcgtctagtccgtttgctggtgagttctggggccaagggacccaggtaactgtgtcttcaaccaccacccctgcccccaggccccccacccccgcccccaccatcgccagccagcccctgtccctgcggcccgaggcctgccggcccgccgccggcggcgccgtgcacacccggggcctggacttcgcctgcgacatctacatctgggcccccctggccggaacctgcggcgtgctgctgctgtccctggtgatcaccctgtactgcaagcggggccggaagaagctgctgtacatcttcaagcagcccttcatgcgccccgtgcagaccacccaggaggaggacggctgcagctgcaggttccccgaggaggaggaggggggctgcgagctgcgggtgaagttcagcaggagcgccgacgcccctgcttaccagcagggccagaatcagctgtacaacgagctgaatctgggccggagggaggagtacgacgtgctggacaagcggaggggcagggaccccgagatgggcggcaagcccaggcggaagaacccccaggaggggctgtacaacgagctgcagaaggacaagatggccgaggcctactccgagatcggcatgaagggcgagaggcggagaggcaagggccatgacggcctgtaccagggcctgtccaccgccaccaaggacacctacgacgccctgcacatgcaggccctgcccccccgc

SEQ ID NO: 960 - DNA, 1104 bp, synthetic construct
  source 1..1104: mol_type = other DNA
atggccctgcccgttaccgccctactcctgcccctggccctcctgctccacgccgccaggccccaggtgcagctggtggaatcagggggacgcttggttcaagcagggggtagccttaggttgtcttgtgcggcaagtgggcggacgtttaatacaatggcctggtttcgacaggcacctggaaaggaaagggaatttgtagctgccatcacctggtccggggggttgacatactacgaggatagcgtaaaagggaggtttacaatttttcgagacaacgcaaaaaatttggcataccttcagctcaactcattgaaacccgaggatacagctgtatattcttgtgccgcccgatcaacttttaggactgccctggttaatactgttacggcgtatgacacttggggacaaggcacccaagtgacggtaagctcaaccaccacccctgcccccaggccccccacccccgcccccaccatcgccagccagcccctgtccctgcggcccgaggcctgccggcccgccgccggcggcgccgtgcacacccggggcctggacttcgcctgcgacatctacatctgggcccccctggccggaacctgcggcgtgctgctgctgtccctggtgatcaccctgtactgcaagcggggccggaagaagctgctgtacatcttcaagcagcccttcatgcgccccgtgcagaccacccaggaggaggacggctgcagctgcaggttccccgaggaggaggaggggggctgcgagctgcgggtgaagttcagcaggagcgccgacgcccctgcttaccagcagggccagaatcagctgtacaacgagctgaatctgggccggagggaggagtacgacgtgctggacaagcggaggggcagggaccccgagatgggcggcaagcccaggcggaagaacccccaggaggggctgtacaacgagctgcagaaggacaagatggccgaggcctactccgagatcggcatgaagggcgagaggcggagaggcaagggccatgacggcctgtaccagggcctgtccaccgccaccaaggacacctacgacgccctgcacatgcaggccctgcccccccgc

SEQ ID NO: 961 - DNA, 387 bp, synthetic construct
  source 1..387: mol_type = other DNA
caagttcaattggtagagtccggtggaggactggtccaaccgggagggtctttgcggttgtcatgcgccgcctctggcagcattttttctgtgaatgatatgggttggtatcgacaagcgcctggtaagcaacgggaactcgtagccgcgatatattccggtggctctacaaattacgcggatagtgtaaaaggccggtttaccatctcccgagataatgctaagaataccgtctatcttcaaatgaacagcttgaagcccgaggacacagcagtgtattattgcaacgccgacattgtagtggtcacgactacccctccgagtttccctatgccctatcggttcttggaggtatggggtcagggaacgcttgttactgtaagttct

SEQ ID NO: 962 - protein, 7 aa, synthetic construct
GFSLDFY

SEQ ID NO: 963 - protein, 6 aa, synthetic construct
TWSGER

SEQ ID NO: 964 - protein, 18 aa, synthetic construct
DSGYPCYGSSWSSVGYDF

SEQ ID NO: 965 - protein, 10 aa, synthetic construct
GFSLDFYSIG

SEQ ID NO: 966 - protein, 10 aa, synthetic construct
CITWSGERTN

SEQ ID NO: 967 - protein, 18 aa, synthetic construct
DSGYPCYGSSWSSVGYDF

SEQ ID NO: 968 - protein, 6 aa, synthetic construct
DFYSIG

SEQ ID NO: 969 - protein, 13 aa, synthetic construct
GVSCITWSGERTN

SEQ ID NO: 970 - protein, 19 aa, synthetic construct
AADSGYPCYGSSWSSVGYD

SEQ ID NO: 971 - protein, 8 aa, synthetic construct
GFSLDFYS

SEQ ID NO: 972 - protein, 8 aa, synthetic construct
ITWSGERT

SEQ ID NO: 973 - protein, 20 aa, synthetic construct
AADSGYPCYGSSWSSVGYDF

SEQ ID NO: 974 - protein, 7 aa, synthetic construct
GFALDGY

SEQ ID NO: 975 - protein, 6 aa, synthetic construct
SRSDTS

SEQ ID NO: 976 - protein, 18 aa, synthetic construct
SLQSGLLSRFLLPRQYDH

SEQ ID NO: 977 - protein, 10 aa, synthetic construct
GFALDGYTIG

SEQ ID NO: 978 - protein, 10 aa, synthetic construct
CISRSDTSTK

SEQ ID NO: 979 - protein, 18 aa, synthetic construct
SLQSGLLSRFLLPRQYDH

SEQ ID NO: 980 - protein, 6 aa, synthetic construct
DGYTIG

SEQ ID NO: 981 - protein, 13 aa, synthetic construct
GVACISRSDTSTK

SEQ ID NO: 982 - protein, 19 aa, synthetic construct
AASLQSGLLSRFLLPRQYD

SEQ ID NO: 983 - protein, 8 aa, synthetic construct
GFALDGYT

SEQ ID NO: 984 - protein, 8 aa, synthetic construct
ISRSDTST

SEQ ID NO: 985 - protein, 20 aa, synthetic construct
AASLQSGLLSRFLLPRQYDH

SEQ ID NO: 986 - protein, 7 aa, synthetic construct
GFALDGY

SEQ ID NO: 987 - protein, 6 aa, synthetic construct
SRSTSD

SEQ ID NO: 988 - protein, 18 aa, synthetic construct
SRQTGLLSTFLLPRQYDH

SEQ ID NO: 989 - protein, 10 aa, synthetic construct
GFALDSYTIG

SEQ ID NO: 990 - protein, 10 aa, synthetic construct
CISRSTSDAR

SEQ ID NO: 991 - protein, 18 aa, synthetic construct
SRQTGLLSTFLLPRQYDH

SEQ ID NO: 992 - protein, 5 aa, synthetic construct
SYTIG

SEQ ID NO: 993 - protein, 17 aa, synthetic construct
CISRSTSDARYADSVKG

SEQ ID NO: 994 - protein, 18 aa, synthetic construct
SRQTGLLSTFLLPRQYDH

SEQ ID NO: 995 - protein, 6 aa, synthetic construct
DSYTIG

SEQ ID NO: 996 - protein, 13 aa, synthetic construct
GLSCISRSTSDAR

SEQ ID NO: 997 - protein, 19 aa, synthetic construct
AASRQTGLLSTFLLPRQYD

SEQ ID NO: 998 - protein, 8 aa, synthetic construct
GFALDSYT

SEQ ID NO: 999 - protein, 8 aa, synthetic construct
ISRSTSDA

SEQ ID NO: 1000 - protein, 20 aa, synthetic construct
AASRQTGLLSTFLLPRQYDH

SEQ ID NO: 1001 - protein, 7 aa, synthetic construct
RSIAIFN

SEQ ID NO: 1002 - protein, 5 aa, synthetic construct
TGGSR

SEQ ID NO: 1003 - protein, 8 aa, synthetic construct
SSPFAGEF

SEQ ID NO: 1004 - protein, 10 aa, synthetic construct
RSIAIFNFMA

SEQ ID NO: 1005 - protein, 9 aa, synthetic construct
SITGGSRLS

SEQ ID NO: 1006 - protein, 6 aa, synthetic construct
IFNFMA

SEQ ID NO: 1007 - protein, 12 aa, synthetic construct
LVASITGGSRLS

SEQ ID NO: 1008 - protein, 9 aa, synthetic construct
AASSPFAGE

SEQ ID NO: 1009 - protein, 7 aa, synthetic construct
RSIAIFN

SEQ ID NO: 1010 - protein, 8 aa, synthetic construct
ITGGSRLS

SEQ ID NO: 1011 - protein, 10 aa, synthetic construct
AASSPFAGEF

SEQ ID NO: 1012 - protein, 7 aa, synthetic construct
DPIVTFN

SEQ ID NO: 1013 - protein, 5 aa, synthetic construct
TMSGI

SEQ ID NO: 1014 - protein, 5 aa, synthetic construct
EHSGY

SEQ ID NO: 1015 - protein, 10 aa, synthetic construct
DPIVTFNTMG

SEQ ID NO: 1016 - protein, 9 aa, synthetic construct
RITMSGIPN

SEQ ID NO: 1017 - protein, 6 aa, synthetic construct
TFNTMG

SEQ ID NO: 1018 - protein, 12 aa, synthetic construct
LVARITMSGIPN

SEQ ID NO: 1019 - protein, 6 aa, synthetic construct
RAEHSG

SEQ ID NO: 1020 - protein, 8 aa, synthetic construct
DPIVTFNT

SEQ ID NO: 1021 - protein, 7 aa, synthetic construct
ITMSGIP

SEQ ID NO: 1022 - protein, 7 aa, synthetic construct
RAEHSGY

SEQ ID NO: 1023 - protein, 7 aa, synthetic construct
GNIVDID

SEQ ID NO: 1024 - protein, 5 aa, synthetic construct
TAGGI

SEQ ID NO: 1025 - protein, 10 aa, synthetic construct
IRRYYPRFDY

SEQ ID NO: 1026 - protein, 10 aa, synthetic construct
GNIVDIDDMG

SEQ ID NO: 1027 - protein, 9 aa, synthetic construct
TITAGGIAN

SEQ ID NO: 1028 - protein, 6 aa, synthetic construct
DIDDMG

SEQ ID NO: 1029 - protein, 12 aa, synthetic construct
LVATITAGGIAN

SEQ ID NO: 1030 - protein, 11 aa, synthetic construct
YAIRRYYPRFD

SEQ ID NO: 1031 - protein, 8 aa, synthetic construct
GNIVDIDD

SEQ ID NO: 1032 - protein, 7 aa, synthetic construct
ITAGGIA

SEQ ID NO: 1033 - protein, 12 aa, synthetic construct
YAIRRYYPRFDY

SEQ ID NO: 1034 - protein, 7 aa, synthetic construct
GNIVDID

SEQ ID NO: 1035 - protein, 5 aa, synthetic construct
TAGGI

SEQ ID NO: 1036 - protein, 10 aa, synthetic construct
GNIVDIDDMG

SEQ ID NO: 1037 - protein, 9 aa, synthetic construct
SITAGGITK

SEQ ID NO: 1038 - protein, 12 aa, synthetic construct
LVASITAGGITK

SEQ ID NO: 1039 - protein, 11 aa, synthetic construct
YAVRRYYPRFD

SEQ ID NO: 1040 - protein, 7 aa, synthetic construct
ITAGGIT

SEQ ID NO: 1041 - skipped

SEQ ID NO: 1042 - protein, 12 aa, synthetic construct
YAVRRYYPRFDY

SEQ ID NO: 1043 - protein, 7 aa, synthetic construct
GNIVEID

SEQ ID NO: 1044 - protein, 10 aa, synthetic construct
GNIVEIDDMG

SEQ ID NO: 1045 - protein, 9 aa, synthetic construct
TITAGGITN

SEQ ID NO: 1046 - protein, 6 aa, synthetic construct
EIDDMG

SEQ ID NO: 1047 - protein, 12 aa, synthetic construct
LVATITAGGITN

SEQ ID NO: 1048 - protein, 11 aa, synthetic construct
YAIRKYYPRFD

SEQ ID NO: 1049 - protein, 8 aa, synthetic construct
GNIVEIDD

SEQ ID NO: 1050 - protein, 7 aa, synthetic construct
ITAGGIT

SEQ ID NO: 1051 - protein, 12 aa, synthetic construct
YAIRKYYPRFDY

SEQ ID NO: 1052 - protein, 7 aa, synthetic construct
GNIVDID

SEQ ID NO: 1053 - protein, 10 aa, synthetic construct
GNIVDIDDMG

SEQ ID NO: 1054 - protein, 9 aa, synthetic construct
SITAGGITK

SEQ ID NO: 1055 - protein, 12 aa, synthetic construct
LVASITAGGITK

SEQ ID NO: 1056 - protein, 11 aa, synthetic construct
YAVRKYYPRFD

SEQ ID NO: 1057 - protein, 12 aa, synthetic construct
YAVRKYYPRFDY

SEQ ID NO: 1058 - protein, 7 aa, synthetic construct
GNSVDID

SEQ ID NO: 1059 - protein, 10 aa, synthetic construct
GNSVDIDDMG

SEQ ID NO: 1060 - protein, 9 aa, synthetic construct
TITAGGITK

SEQ ID NO: 1061 - protein, 12 aa, synthetic construct
LVATITAGGITK

SEQ ID NO: 1062 - protein, 8 aa, synthetic construct
GNSVDIDD

SEQ ID NO: 1063 - protein, 5 aa, synthetic construct
TAGRI

SEQ ID NO: 1064 - protein, 9 aa, synthetic construct
SITAGRITK

SEQ ID NO: 1065 - protein, 12 aa, synthetic construct
LVASITAGRITK

SEQ ID NO: 1066 - protein, 11 aa, synthetic construct
YAIRRSYPRFD

SEQ ID NO: 1067 - protein, 7 aa, synthetic construct
ITAGRIT

SEQ ID NO: 1068 - protein, 12 aa, synthetic construct
YAIRRSYPRFDY

SEQ ID NO: 1069 - protein, 7 aa, synthetic construct
GNGVDID

SEQ ID NO: 1070 - protein, 10 aa, synthetic construct
GNGVDIDDMG

SEQ ID NO: 1071 - protein, 8 aa, synthetic construct
GNGVDIDD

SEQ ID NO: 1072 - protein, 12 aa, synthetic construct
LVATITAGGITN

SEQ ID NO: 1073 - protein, 11 aa, synthetic construct
YAIRKFYPRFD

SEQ ID NO: 1074 - protein, 12 aa, synthetic construct
YAIRKFYPRFDY

SEQ ID NO: 1075 - protein, 9 aa, synthetic construct
TITAGGITK

SEQ ID NO: 1076 - protein, 12 aa, synthetic construct
LVATITAGGITK

SEQ ID NO: 1077 - protein, 11 aa, synthetic construct
YAIRRFYPRFD

SEQ ID NO: 1078 - protein, 12 aa, synthetic construct
YAIRRFYPRFDY

SEQ ID NO: 1079 - protein, 9 aa, synthetic construct
SITAGGITN

SEQ ID NO: 1080 - protein, 12 aa, synthetic construct
LVASITAGGITN

SEQ ID NO: 1081 - protein, 7 aa, synthetic construct
GAFVSID

SEQ ID NO: 1082 - protein, 5 aa, synthetic construct
SSGGI

SEQ ID NO: 1083 - protein, 10 aa, synthetic construct
GAFVSIDAMA

SEQ ID NO: 1084 - protein, 9 aa, synthetic construct
FSSSGGITN

SEQ ID NO: 1085 - protein, 6 aa, synthetic construct
SIDAMA

SEQ ID NO: 1086 - protein, 12 aa, synthetic construct
LVAFSSSGGITN

SEQ ID NO: 1087 - protein, 11 aa, synthetic construct
NADILQSGWYT

SEQ ID NO: 1088 - protein, 8 aa, synthetic construct
GAFVSIDA

SEQ ID NO: 1089 - protein, 7 aa, synthetic construct
SSSGGIT

SEQ ID NO: 1090 - protein, 12 aa, synthetic construct
NADILQSGWYTY

SEQ ID NO: 1091 - protein, 7 aa, synthetic construct
GSIFSMN

SEQ ID NO: 1092 - protein, 5 aa, synthetic construct
TDNDF

SEQ ID NO: 1093 - protein, 10 aa, synthetic construct
GSIFSMNAMG

SEQ ID NO: 1094 - protein, 9 aa, synthetic construct
TITDNDFTY

SEQ ID NO: 1095 - protein, 6 aa, synthetic construct
SMNAMG

SEQ ID NO: 1096 - protein, 12 aa, synthetic construct
LVATITDNDFTY

SEQ ID NO: 1097 - protein, 14 aa, synthetic construct
NADGIYSGGRYYPS

SEQ ID NO: 1098 - protein, 8 aa, synthetic construct
GSIFSMNA

SEQ ID NO: 1099 - protein, 7 aa, synthetic construct
ITDNDFT

SEQ ID NO: 1100 - protein, 15 aa, synthetic construct
NADGIYSGGRYYPSS

SEQ ID NO: 1101 - protein, 7 aa, synthetic construct
GSIFSIN

SEQ ID NO: 1102 - protein, 5 aa, synthetic construct
TSGGS

SEQ ID NO: 1103 - protein, 10 aa, synthetic construct
GSIFSINAMA

SEQ ID NO: 1104 - protein, 9 aa, synthetic construct
VITSGGSTN

SEQ ID NO: 1105 - protein, 6 aa, synthetic construct
SINAMA

SEQ ID NO: 1106 - protein, 12 aa, synthetic construct
LVAVITSGGSTN

SEQ ID NO: 1107 - protein, 17 aa, synthetic construct
NADLVYYSGNPGDYGMD

SEQ ID NO: 1108 - protein, 8 aa, synthetic construct
GSIFSINA

SEQ ID NO: 1109 - protein, 7 aa, synthetic construct
ITSGGST

SEQ ID NO: 1110 - protein, 18 aa, synthetic construct
NADLVYYSGNPGDYGMDY

SEQ ID NO: 1111 - protein, 7 aa, synthetic construct
GSIFRPN

SEQ ID NO: 1112 - protein, 5 aa, synthetic construct
TDGGI

SEQ ID NO: 1113 - protein, 10 aa, synthetic construct
GSIFRPNDMG

SEQ ID NO: 1114 - protein, 9 aa, synthetic construct
IITDGGITN

SEQ ID NO: 1115 - protein, 6 aa, synthetic construct
RPNDMG

SEQ ID NO: 1116 - protein, 12 aa, synthetic construct
LVAIITDGGITN

SEQ ID NO: 1117 - protein, 10 aa, synthetic construct
NLNIPYPRVS

SEQ ID NO: 1118 - protein, 8 aa, synthetic construct
GSIFRPND

SEQ ID NO: 1119 - protein, 7 aa, synthetic construct
ITDGGIT

SEQ ID NO: 1120 - protein, 11 aa, synthetic construct
NLNIPYPRVSS

SEQ ID NO: 1121 - protein, 7 aa, synthetic construct
GSIFSVN

SEQ ID NO: 1122 - protein, 5 aa, synthetic construct
YSGGS

SEQ ID NO: 1123 - protein, 10 aa, synthetic construct
GSIFSVNDMG

SEQ ID NO: 1124 - protein, 9 aa, synthetic construct
ASYSGGSTN

SEQ ID NO: 1125 - protein, 6 aa, synthetic construct
SVNDMG

SEQ ID NO: 1126 - protein, 12 aa, synthetic construct
LVAASYSGGSTN

SEQ ID NO: 1127 - protein, 22 aa, synthetic construct
NADLVVVTTTPPSFPMPYRFLE

SEQ ID NO: 1128 - protein, 8 aa, synthetic construct
GSIFSVND

SEQ ID NO: 1129 - protein, 7 aa, synthetic construct
SYSGGST

SEQ ID NO: 1130 - protein, 23 aa, synthetic construct
NADLVVVTTTPPSFPMPYRFLEV

SEQ ID NO: 1131 - protein, 7 aa, synthetic construct
GSIFSVN

SEQ ID NO: 1132 - protein, 5 aa, synthetic construct
YSGGS

SEQ ID NO: 1133 - protein, 10 aa, synthetic construct
GSIFSVNDMG

SEQ ID NO: 1134 - protein, 9 aa, synthetic construct
AIYSGGSTN

SEQ ID NO: 1135 - protein, 6 aa, synthetic construct
SVNDMG

SEQ ID NO: 1136 - protein, 12 aa, synthetic construct
LVAAIYSGGSTN

SEQ ID NO: 1137 - protein, 22 aa, synthetic construct
NADIVVVTTTPPSFPMPYRFLE

SEQ ID NO: 1138 - protein, 8 aa, synthetic construct
GSIFSVND

SEQ ID NO: 1139 - protein, 7 aa, synthetic construct
IYSGGST

SEQ ID NO: 1140 - protein, 23 aa, synthetic construct
NADIVVVTTTPPSFPMPYRFLEV

SEQ ID NO: 1141 - protein, 8 aa, synthetic construct
SGRALSGW

SEQ ID NO: 1142 - protein, 6 aa, synthetic construct
SMSDGS

SEQ ID NO: 1143 - protein, 11 aa, synthetic construct
SGRALSGWQMG

SEQ ID NO: 1144 - protein, 10 aa, synthetic construct
SISMSDGSTS

SEQ ID NO: 1145 - protein, 7 aa, synthetic construct
LSGWQMG

SEQ ID NO: 1146 - protein, 13 aa, synthetic construct
FVASISMSDGSTS

SEQ ID NO: 1147 - protein, 9 aa, synthetic construct
QGRSRFGFE

SEQ ID NO: 1148 - protein, 9 aa, synthetic construct
SGRALSGWQ

SEQ ID NO: 1149 - protein, 8 aa, synthetic construct
ISMSDGST

SEQ ID NO: 1150 - protein, 10 aa, synthetic construct
QGRSRFGFEY

SEQ ID NO: 1151 - protein, 7 aa, synthetic construct
GLILSNH

SEQ ID NO: 1152 - protein, 5 aa, synthetic construct
YTDGS

SEQ ID NO: 1153 - protein, 10 aa, synthetic construct
GLILSNHGMG

SEQ ID NO: 1154 - protein, 9 aa, synthetic construct
GSYTDGSTY

SEQ ID NO: 1155 - protein, 6 aa, synthetic construct
SNHGMG

SEQ ID NO: 1156 - protein, 12 aa, synthetic construct
WVSGSYTDGSTY

SEQ ID NO: 1157 - protein, 12 aa, synthetic construct
AARQYYRSGYVD

SEQ ID NO: 1158 - protein, 8 aa, synthetic construct
GLILSNHG

SEQ ID NO: 1159 - protein, 7 aa, synthetic construct
SYTDGST

SEQ ID NO: 1160 - protein, 13 aa, synthetic construct
AARQYYRSGYVDY

SEQ ID NO: 1161 - protein, 7 aa, synthetic construct
GFAFGSF

SEQ ID NO: 1162 - protein, 6 aa, synthetic construct
NRGGDR

SEQ ID NO: 1163 - protein, 10 aa, synthetic construct
GFAFGSFAID

SEQ ID NO: 1164 - protein, 10 aa, synthetic construct
AINRGGDRTY

SEQ ID NO: 1165 - protein, 6 aa, synthetic construct
GSFAID

SEQ ID NO: 1166 - protein, 13 aa, synthetic construct
WVSAINRGGDRTY

SEQ ID NO: 1167 - protein, 16 aa, synthetic construct
AAGGRVSADGKKWEYD

SEQ ID NO: 1168 - protein, 8 aa, synthetic construct
GFAFGSFA

SEQ ID NO: 1169 - protein, 8 aa, synthetic construct
INRGGDRT

SEQ ID NO: 1170 - protein, 17 aa, synthetic construct
AAGGRVSADGKKWEYDY

SEQ ID NO: 1171 - protein, 7 aa, synthetic construct
GFPFDDY

SEQ ID NO: 1172 - protein, 6 aa, synthetic construct
NRNGGS

SEQ ID NO: 1173 - protein, 10 aa, synthetic construct
GFPFDDYSMD

SEQ ID NO: 1174 - protein, 10 aa, synthetic construct
AINRNGGSTY

SEQ ID NO: 1175 - protein, 6 aa, synthetic construct
DDYSMD

SEQ ID NO: 1176 - protein, 13 aa, synthetic construct
WVSAINRNGGSTY

SEQ ID NO: 1177 - protein, 16 aa, synthetic construct
AAGGRVSADGKKWEYD

SEQ ID NO: 1178 - protein, 8 aa, synthetic construct
GFPFDDYS

SEQ ID NO: 1179 - protein, 8 aa, synthetic construct
INRNGGST

SEQ ID NO: 1180 - protein, 17 aa, synthetic construct
AAGGRVSADGKKWEYDY

SEQ ID NO: 1181 - protein, 7 aa, synthetic construct
GRTIAST

SEQ ID NO: 1182 - protein, 6 aa, synthetic construct
ARSGDS

SEQ ID NO: 1183 - protein, 10 aa, synthetic construct
GRTIASTIMG

SEQ ID NO: 1184 - protein, 10 aa, synthetic construct
ISARSGDSES

SEQ ID NO: 1185 - protein, 6 aa, synthetic construct
ASTIMG

SEQ ID NO: 1186 - protein, 13 aa, synthetic construct
FVAISARSGDSES

SEQ ID NO: 1187 - protein, 8 aa, synthetic construct
YWNTGAGT

SEQ ID NO: 1188 - protein, 8 aa, synthetic construct
GRTIASTI

SEQ ID NO: 1189 - protein, 8 aa, synthetic construct
SARSGDSE

SEQ ID NO: 1190 - protein, 9 aa, synthetic construct
YWNTGAGTI

SEQ ID NO: 1191 - protein, 5 aa, synthetic construct
GRTFN

SEQ ID NO: 1192 - protein, 6 aa, synthetic construct
TWSGGL

SEQ ID NO: 1193 - protein, 8 aa, synthetic construct
GRTFNTMA

SEQ ID NO: 1194 - protein, 10 aa, synthetic construct
AITWSGGLTY

SEQ ID NO: 1195 - protein, 4 aa, synthetic construct
NTMA

SEQ ID NO: 1196 - protein, 13 aa, synthetic construct
FVAAITWSGGLTY

SEQ ID NO: 1197 - protein, 18 aa, synthetic construct
AARSTFRTALVNTVTAYD

SEQ ID NO: 1198 - protein, 6 aa, synthetic construct
GRTFNT

SEQ ID NO: 1199 - protein, 8 aa, synthetic construct
ITWSGGLT

SEQ ID NO: 1200 - protein, 19 aa, synthetic construct
AARSTFRTALVNTVTAYDT

SEQ ID NO: 1201 - protein, 5 aa, synthetic construct
GSTFN

SEQ ID NO: 1202 - protein, 6 aa, synthetic construct
SWSGGL

SEQ ID NO: 1203 - protein, 8 aa, synthetic construct
GSTFNTMA

SEQ ID NO: 1204 - protein, 10 aa, synthetic construct
AISWSGGLTY

SEQ ID NO: 1205 - protein, 13 aa, synthetic construct
FVAAISWSGGLTY

SEQ ID NO: 1206 - protein, 18 aa, synthetic construct
AARTTFRTGLIVTVTAYD

SEQ ID NO: 1207 - protein, 6 aa, synthetic construct
GSTFNT

SEQ ID NO: 1208 - protein, 8 aa, synthetic construct
ISWSGGLT

SEQ ID NO: 1209 - protein, 19 aa, synthetic construct
AARTTFRTGLIVTVTAYDT

SEQ ID NO: 1210 - protein, 18 aa, synthetic construct
AARRTFRTALINTVTAYD

SEQ ID NO: 1211 - protein, 19 aa, synthetic construct
AARRTFRTALINTVTAYDT

SEQ ID NO: 1212 - protein, 18 aa, synthetic construct
AARRTFRTALINTITAYD

SEQ ID NO: 1213 - protein, 19 aa, synthetic construct
AARRTFRTALINTITAYDT

SEQ ID NO: 1214 - protein, 6 aa, synthetic construct
AWNSGL

SEQ ID NO: 1215 - protein, 10 aa, synthetic construct
AIAWNSGLTY

SEQ ID NO: 1216 - protein, 13 aa, synthetic construct
FVAAIAWNSGLTY

SEQ ID NO: 1217 - protein, 18 aa, synthetic construct
AARRTFRTGLINTVTAYD

SEQ ID NO: 1218 - protein, 8 aa, synthetic construct
IAWNSGLT

SEQ ID NO: 1219 - protein, 19 aa, synthetic construct
AARRTFRTGLINTVTAYDT

SEQ ID NO: 1220 - protein, 18 aa, synthetic construct
AARRTFRTGLIDTVTAYD

SEQ ID NO: 1221 - protein, 19 aa, synthetic construct
AARRTFRTGLIDTVTAYDT

SEQ ID NO: 1222 - protein, 7 aa, synthetic construct
GRAFSGH

SEQ ID NO: 1223 - protein, 6 aa, synthetic construct
SWSGVS

SEQ ID NO: 1224 - protein, 10 aa, synthetic construct
GRAFSGHGMG

SEQ ID NO: 1225 - protein, 10 aa, synthetic construct
AISWSGVSTA

SEQ ID NO: 1226 - protein, 6 aa, synthetic construct
SGHGMG

SEQ ID NO: 1227 - protein, 13 aa, synthetic construct
FVAAISWSGVSTA

SEQ ID NO: 1228 - protein, 16 aa, synthetic construct
AAGLYSRPTTERREYI

SEQ ID NO: 1229 - protein, 8 aa, synthetic construct
GRAFSGHG

SEQ ID NO: 1230 - protein, 8 aa, synthetic construct
ISWSGVST

SEQ ID NO: 1231 - protein, 17 aa, synthetic construct
AAGLYSRPTTERREYIY

SEQ ID NO: 1232 - protein, 7 aa, synthetic construct
GRALSGH

SEQ ID NO: 1233 - protein, 10 aa, synthetic construct
GRALSGHGMG

SEQ ID NO: 1234 - protein, 16 aa, synthetic construct
AAGLYSRPTTERRDYI

SEQ ID NO: 1235 - protein, 8 aa, synthetic construct
GRALSGHG

SEQ ID NO: 1236 - protein, 17 aa, synthetic construct
AAGLYSRPTTERRDYIY

SEQ ID NO: 1237 - protein, 7 aa, synthetic construct
GFTFSNY

SEQ ID NO: 1238 - protein, 6 aa, synthetic construct
DSGGGS

SEQ ID NO: 1239 - protein, 10 aa, synthetic construct
GFTFSNYGMM

SEQ ID NO: 1240 - protein, 10 aa, synthetic construct
YIDSGGGSTY

SEQ ID NO: 1241 - protein, 6 aa, synthetic construct
SNYGMM

SEQ ID NO: 1242 - protein, 13 aa, synthetic construct
WVSYIDSGGGSTY

SEQ ID NO: 1243 - protein, 12 aa, synthetic construct
AKAIGVVSGSLE

SEQ ID NO: 1244 - protein, 8 aa, synthetic construct
GFTFSNYG

SEQ ID NO: 1245 - protein, 8 aa, synthetic construct
IDSGGGST

SEQ ID NO: 1246 - protein, 13 aa, synthetic construct
AKAIGVVSGSLEV

SEQ ID NO: 1247 - protein, 7 aa, synthetic construct
GFLFSLY

SEQ ID NO: 1248 - protein, 6 aa, synthetic construct
SNGGVT

SEQ ID NO: 1249 - protein, 10 aa, synthetic construct
GFLFSLYAMA

SEQ ID NO: 1250 - protein, 10 aa, synthetic construct
DISNGGVTTR

SEQ ID NO: 1251 - protein, 6 aa, synthetic construct
SLYAMA

SEQ ID NO: 1252 - protein, 13 aa, synthetic construct
WVSDISNGGVTTR

SEQ ID NO: 1253 - protein, 8 aa, synthetic construct
AVTTTGWR

SEQ ID NO: 1254 - protein, 8 aa, synthetic construct
GFLFSLYA

SEQ ID NO: 1255 - protein, 8 aa, synthetic construct
ISNGGVTT

SEQ ID NO: 1256 - protein, 9 aa, synthetic construct
AVTTTGWRA

SEQ ID NO: 1257 - protein, 7 aa, synthetic construct
GFTFSGY

SEQ ID NO: 1258 - protein, 6 aa, synthetic construct
YSDDSN

SEQ ID NO: 1259 - protein, 10 aa, synthetic construct
GFTFSGYYMS

SEQ ID NO: 1260 - protein, 10 aa, synthetic construct
SIYSDDSNTY

SEQ ID NO: 1261 - protein, 6 aa, synthetic construct
SGYYMS

SEQ ID NO: 1262 - protein, 13 aa, synthetic construct
WVSSIYSDDSNTY

SEQ ID NO: 1263 - protein, 14 aa, synthetic construct
AASATLRGRDTRFD

SEQ ID NO: 1264 - protein, 8 aa, synthetic construct
GFTFSGYY

SEQ ID NO: 1265 - protein, 8 aa, synthetic construct
IYSDDSNT

SEQ ID NO: 1266 - protein, 15 aa, synthetic construct
AASATLRGRDTRFDY

SEQ ID NO: 1267 - protein, 7 aa, synthetic construct
SHTFDSY

SEQ ID NO: 1268 - protein, 5 aa, synthetic construct
NWDNV

SEQ ID NO: 1269 - protein, 10 aa, synthetic construct
SHTFDSYTMG

SEQ ID NO: 1270 - protein, 9 aa, synthetic construct
AVNWDNVKN

SEQ ID NO: 1271 - protein, 6 aa, synthetic construct
DSYTMG

SEQ ID NO: 1272 - protein, 12 aa, synthetic construct
FVAAVNWDNVKN

SEQ ID NO: 1273 - protein, 12 aa, synthetic construct
AAGTNLPTRGSG

SEQ ID NO: 1274 - protein, 8 aa, synthetic construct
SHTFDSYT

SEQ ID NO: 1275 - protein, 7 aa, synthetic construct
VNWDNVK

SEQ ID NO: 1276 - protein, 13 aa, synthetic construct
AAGTNLPTRGSGS

SEQ ID NO: 1277 - protein, 7 aa, synthetic construct
SLTFDSY

SEQ ID NO: 1278 - protein, 5 aa, synthetic construct
NWDNV

SEQ ID NO: 1279 - protein, 10 aa, synthetic construct
SLTFDSYTMG

SEQ ID NO: 1280 - protein, 9 aa, synthetic construct
AVNWDNVKN

SEQ ID NO: 1281 - protein, 6 aa, synthetic construct
DSYTMG

SEQ ID NO: 1282 - protein, 12 aa, synthetic construct
FVAAVNWDNVKN

SEQ ID NO: 1283 - protein, 12 aa, synthetic construct
AAGTNLPTIESG

SEQ ID NO: 1284 - protein, 8 aa, synthetic construct
SLTFDSYT

SEQ ID NO: 1285 - protein, 7 aa, synthetic construct
VNWDNVK

SEQ ID NO: 1286 - protein, 13 aa, synthetic construct
AAGTNLPTIESGS

SEQ ID NO: 1287 - protein, 7 aa, synthetic construct
GRTFSIN

SEQ ID NO: 1288 - protein, 6 aa, synthetic construct
RWRGDS

SEQ ID NO: 1289 - protein, 10 aa, synthetic construct
GRTFSINNIN

SEQ ID NO: 1290 - protein, 10 aa, synthetic construct
TTRWRGDSTY

SEQ ID NO: 1291 - protein, 6 aa, synthetic construct
SINNIN

SEQ ID NO: 1292 - protein, 13 aa, synthetic construct
FVATTRWRGDSTY

SEQ ID NO: 1293 - protein, 7 aa, synthetic construct
NAKGGVD

SEQ ID NO: 1294 - protein, 8 aa, synthetic construct
GRTFSINN

SEQ ID NO: 1295 - protein, 8 aa, synthetic construct
TRWRGDST

SEQ ID NO: 1296 - protein, 8 aa, synthetic construct
NAKGGVDV

SEQ ID NO: 1297 - protein, 7 aa, synthetic construct
GRTFSSY

SEQ ID NO: 1298 - protein, 6 aa, synthetic construct
SLSGGS

SEQ ID NO: 1299 - protein, 10 aa, synthetic construct
GRTFSSYAMG

SEQ ID NO: 1300 - protein, 10 aa, synthetic construct
TISLSGGSTF

SEQ ID NO: 1301 - protein, 6 aa, synthetic construct
SSYAMG

SEQ ID NO: 1302 - protein, 13 aa, synthetic construct
FVSTISLSGGSTF

SEQ ID NO: 1303 - protein, 15 aa, synthetic construct
AARPVLISRSSTDYA

SEQ ID NO: 1304 - protein, 8 aa, synthetic construct
GRTFSSYA

SEQ ID NO: 1305 - protein, 8 aa, synthetic construct
ISLSGGST

SEQ ID NO: 1306 - protein, 16 aa, synthetic construct
AARPVLISRSSTDYAY

SEQ ID NO: 1307 - protein, 15 aa, synthetic construct
AARPVLISRSSIDYA

SEQ ID NO: 1308 - protein, 16 aa, synthetic construct
AARPVLISRSSIDYAY

SEQ ID NO: 1309 - protein, 15 aa, synthetic construct
AARPVLISRSSTDYA

SEQ ID NO: 1310 - protein, 16 aa, synthetic construct
AARPVLISRSSTDYAY

SEQ ID NO: 1311 - protein, 7 aa, synthetic construct
GRTFSTY

SEQ ID NO: 1312 - protein, 6 aa, synthetic construct
SSSGDS

SEQ ID NO: 1313 - protein, 10 aa, synthetic construct
GRTFSTYTMG

SEQ ID NO: 1314 - protein, 10 aa, synthetic construct
AISSSGDSTY

SEQ ID NO: 1315 - protein, 6 aa, synthetic construct
STYTMG

SEQ ID NO: 1316 - protein, 13 aa, synthetic construct
FVAAISSSGDSTY

SEQ ID NO: 1317 - protein, 16 aa, synthetic construct
APGEEVAGKYFRALYD

SEQ ID NO: 1318 - protein, 8 aa, synthetic construct
GRTFSTYT

SEQ ID NO: 1319 - protein, 8 aa, synthetic construct
ISSSGDST

SEQ ID NO: 1320 - protein, 17 aa, synthetic construct
APGEEVAGKYFRALYDY

SEQ ID NO: 1321 - protein, 6 aa, synthetic construct
TWSGGS

SEQ ID NO: 1322 - protein, 10 aa, synthetic construct
AITWSGGSTY

SEQ ID NO: 1323 - protein, 13 aa, synthetic construct
FVAAITWSGGSTY

SEQ ID NO: 1324 - protein, 16 aa, synthetic construct
TPGEEVAGKYFRPLYD

SEQ ID NO: 1325 - protein, 8 aa, synthetic construct
ITWSGGST

SEQ ID NO: 1326 - protein, 17 aa, synthetic construct
TPGEEVAGKYFRPLYDY

SEQ ID NO: 1327 - protein, 6 aa, synthetic construct
SWSGGS

SEQ ID NO: 1328 - protein, 10 aa, synthetic construct
AISWSGGSTY

SEQ ID NO: 1329 - protein, 13 aa, synthetic construct
FVAAISWSGGSTY

SEQ ID NO: 1330 - protein, 16 aa, synthetic construct
APGEEVAGKYFRQLYD

SEQ ID NO: 1331 - protein, 8 aa, synthetic construct
ISWSGGST

SEQ ID NO: 1332 - protein, 17 aa, synthetic construct
APGEEVAGKYFRQLYDY

SEQ ID NO: 1333 - protein, 6 aa, synthetic construct
SWSGGT

SEQ ID NO: 1334 - protein, 10 aa, synthetic construct
DISWSGGTTN

SEQ ID NO: 1335 - protein, 13 aa, synthetic construct
FVADISWSGGTTN

SEQ ID NO: 1336 - protein, 16 aa, synthetic construct
APGEEVDGKYFRPLYD

SEQ ID NO: 1337 - protein, 8 aa, synthetic construct
ISWSGGTT

SEQ ID NO: 1338 - protein, 17 aa, synthetic construct
APGEEVDGKYFRPLYDY

SEQ ID NO: 1339 - protein, 7 aa, synthetic construct
GRTFSNY

SEQ ID NO: 1340 - protein, 6 aa, synthetic construct
NWSGGR

SEQ ID NO: 1341 - protein, 10 aa, synthetic construct
GRTFSNYAMG

SEQ ID NO: 1342 - protein, 10 aa, synthetic construct
AINWSGGRIY

SEQ ID NO: 1343 - protein, 6 aa, synthetic construct
SNYAMG

SEQ ID NO: 1344 - protein, 13 aa, synthetic construct
FVAAINWSGGRIY

SEQ ID NO: 1345 - protein, 11 aa, synthetic construct
AAGTNWSIPPD

SEQ ID NO: 1346 - protein, 8 aa, synthetic construct
GRTFSNYA

SEQ ID NO: 1347 - protein, 8 aa, synthetic construct
INWSGGRI

SEQ ID NO: 1348 - protein, 12 aa, synthetic construct
AAGTNWSIPPDY

SEQ ID NO: 1349 - protein, 6 aa, synthetic construct
RWSGGS

SEQ ID NO: 1350 - protein, 10 aa, synthetic construct
AIRWSGGSTY

SEQ ID NO: 1351 - protein, 13 aa, synthetic construct
FVAAIRWSGGSTY

SEQ ID NO: 1352 - protein, 15 aa, synthetic construct
AADPIGLGYEMGEYD

SEQ ID NO: 1353 - protein, 8 aa, synthetic construct
IRWSGGST

SEQ ID NO: 1354 - protein, 16 aa, synthetic construct
AADPIGLGYEMGEYDY

SEQ ID NO: 1355 - protein, 7 aa, synthetic construct
GRTFRSY

SEQ ID NO: 1356 - protein, 6 aa, synthetic construct
SWSGGR

SEQ ID NO: 1357 - protein, 10 aa, synthetic construct
GRTFRSYAMG

SEQ ID NO: 1358 - protein, 10 aa, synthetic construct
AISWSGGRIY

SEQ ID NO: 1359 - protein, 6 aa, synthetic construct
RSYAMG

SEQ ID NO: 1360 - protein, 13 aa, synthetic construct
FVAAISWSGGRIY

SEQ ID NO: 1361 - protein, 13 aa, synthetic construct
AADDFERTMTEVR

SEQ ID NO: 1362 - protein, 8 aa, synthetic construct
GRTFRSYA

SEQ ID NO: 1363 - protein, 8 aa, synthetic construct
ISWSGGRI

SEQ ID NO: 1364 - protein, 14 aa, synthetic construct
AADDFERTMTEVRY

SEQ ID NO: 1365 - protein, 10 aa, synthetic construct
AISWSGGSIY

SEQ ID NO: 1366 - protein, 13 aa, synthetic construct
FVAAISWSGGSIY

SEQ ID NO: 1367 - protein, 14 aa, synthetic construct
AADGTLRTPMNLIH

SEQ ID NO: 1368 - protein, 8 aa, synthetic construct
ISWSGGSI

SEQ ID NO: 1369 - protein, 15 aa, synthetic construct
AADGTLRTPMNLIHY

SEQ ID NO: 1370 - protein, 7 aa, synthetic construct
GRTVSSY

SEQ ID NO: 1371 - protein, 10 aa, synthetic construct
GRTVSSYAMG

SEQ ID NO: 1372 - protein, 14 aa, synthetic construct
AADPSLSRTMDEIG

SEQ ID NO: 1373 - protein, 8 aa, synthetic construct
GRTVSSYA

SEQ ID NO: 1374 - protein, 15 aa, synthetic construct
AADPSLSRTMDEIGS

SEQ ID NO: 1375 - protein, 7 aa, synthetic construct
GRTFTSY

SEQ ID NO: 1376 - protein, 6 aa, synthetic construct
SWRGVN

SEQ ID NO: 1377 - protein, 10 aa, synthetic construct
GRTFTSYAMG

SEQ ID NO: 1378 - protein, 10 aa, synthetic construct
AISWRGVNTY

SEQ ID NO: 1379 - protein, 6 aa, synthetic construct
TSYAMG

SEQ ID NO: 1380 - protein, 13 aa, synthetic construct
FVAAISWRGVNTY

SEQ ID NO: 1381 - protein, 13 aa, synthetic construct
AAGPLGATMSEIG

SEQ ID NO: 1382 - protein, 8 aa, synthetic construct
GRTFTSYA

SEQ ID NO: 1383 - protein, 8 aa, synthetic construct
ISWRGVNT

SEQ ID NO: 1384 - protein, 14 aa, synthetic construct
AAGPLGATMSEIGS

SEQ ID NO: 1385 - protein, 13 aa, synthetic construct
FVSAISWSGGSTY

SEQ ID NO: 1386 - protein, 13 aa, synthetic construct
AAGPLGATMSEIG

SEQ ID NO: 1387 - protein, 14 aa, synthetic construct
AAGPLGATMSEIGS

SEQ ID NO: 1388 - protein, 6 aa, synthetic construct
SWSGGG

SEQ ID NO: 1389 - protein, 10 aa, synthetic construct
AISWSGGGTY

SEQ ID NO: 1390 - protein, 13 aa, synthetic construct
FVAAISWSGGGTY

SEQ ID NO: 1391 - protein, 8 aa, synthetic construct
ISWSGGGT

SEQ ID NO: 1392 - protein, 7 aa, synthetic construct
GRTVSSY

SEQ ID NO: 1393 - protein, 6 aa, synthetic construct
SWSGGS

SEQ ID NO: 1394 - protein, 10 aa, synthetic construct
GRTVSSYAMG

SEQ ID NO: 1395 - protein, 10 aa, synthetic construct
AISWSGGSTY

SEQ ID NO: 1396 - protein, 13 aa, synthetic construct
FVAAISWSGGSTY

SEQ ID NO: 1397 - protein, 13 aa, synthetic construct
AAGPLGATMSEIG

SEQ ID NO: 1398 - protein, 8 aa, synthetic construct
ISWSGGST

SEQ ID NO: 1399 - protein, 14 aa, synthetic construct
AAGPLGATMSEIGS